(19) United States
(12) Patent Application Publication
(10) Pub. No.: US 2006/0019284 A1
(43) Pub. Date: Jan. 26, 2006

(54) Identification of polynucleotides for predicting activity of compounds that interact with and/or modulate protein tyrosine kinases and/or protein tyrosine kinase pathways in lung cancer cells

(76) Inventors: Fei Huang, Princeton, NJ (US); Karen A. Reeves, Ewing, NJ (US); Xia Han, Pennington, NJ (US); Craig R. Fairchild, Yardley, PA (US); Peter Shaw, Yardley, PA (US)

Correspondence Address: STEPHEN B. DAVIS;BRISTOL-MYERS SQUIBB COMPANY, PATENT DEPARTMENT, P O BOX 4000, PRINCETON, NJ, 08543-4000, US

(21) Appl. No.: 11/169,041

(22) Filed: Jun. 28, 2005

Related U.S. Application Data
(60) Provisional application No. 60/584,405, filed on Jun. 30, 2004.

(51) Int. Cl. C12Q 1/68

(52) U.S. Cl. 435/6

(57) ABSTRACT

The present invention describes polynucleotides that have been discovered to correlate to the relative intrinsic sensitivity or resistance of cells, e.g., lung cell lines, to treatment with compounds that interact with and modulate, e.g., inhibit, protein tyrosine kinases, such as, for example, members of the Src family of tyrosine kinases, e.g., Src, Fgr, Fyn, Yes, Blk, Hck, Lck and Lyn, as well as other protein tyrosine kinases, including, Bcr-abl, Jak, PDGFR, c-kit and Ephr. These polynucleotides have been shown, through a weighted voting cross validation program, to have utility in predicting the resistance and sensitivity of lung cell lines to the compounds. The expression level of some polynucleotides is regulated by treatment with a particular protein tyrosine kinase inhibitor compound, thus indicating that these polynucleotides are involved in the protein tyrosine kinase signal transduction pathway, e.g., Src tyrosine kinase. Such polynucleotides, whose expression levels correlate highly with drug sensitivity or resistance and which are modulated by treatment with the compounds, comprise polynucleotide predictor or marker sets useful in methods of predicting drug response, and as prognostic or diagnostic indicators in disease management, particularly in those disease areas, e.g., lung cancer, in which signaling through the protein tyrosine kinase pathway, such as the Src tyrosine kinase pathway, is involved with the disease process.

[0001] This application claims benefit to provisional application U.S. Ser. No. 60/584,405 filed Jun. 30, 2004, under 35 U.S.C. 119(e). The entire teachings of the referenced application is incorporated herein by reference.

### FIELD OF THE INVENTION

[0002] The present invention relates generally to the field of pharmacogenomics, and more specifically to new and alternative methods and procedures to determine drug sensitivity in patients, and particularly in patients with lung cancer. This invention allows the development of individualized genetic profiles which aid in treating diseases and disorders based on patient response at a molecular level.

### BACKGROUND OF THE INVENTION

[0003] Lung cancer is divided into two major histologic types: small cell lung cancer (SCLC) and non-small cell lung cancer (NSCLC). Although it has been exciting for lung cancer doctors to observe objective remissions with anti-cancer drugs, such as gefitinib and erlotinib in heavily pretreated NSCLC patients, all of the reported phase III trials testing non-cytotoxic, targeted therapies in NSCLC have been negative. New predictive markers are needed to accurately predict patient response to drugs in the clinic, as it would greatly facilitate implementation of individualed patient therapy and potentially lessen the incidence of adverse events commonly observed for such therapy.

[0004] The problem may be solved by the identification of new parameters that could better predict the patient's sensitivity to treatment. The classification of patient samples is a crucial aspect of cancer diagnosis and treatment. The association of a patient's response to drug treatment with molecular and genetic markers can open up new opportunities for drug development in non-responding patients, or distinguish a drug's indication among other treatment choices as a consequence of increased efficacy predictions. Further, the pre-selection of patients who are likely to respond well to a medicine, drug, or combination therapy may reduce the number of patients needed in a clinical study or accelerate the time needed to complete a clinical development program (M. Cockett et al., 2000, Current Opinion in Biotechnology, 11:602-609).

[0005] The ability to predict drug sensitivity in patients is particularly challenging because drug responses reflect not only properties intrinsic to the target cells, but also a host's metabolic properties. Efforts by those in the art to use genetic information to predict drug sensitivity have primarily focused on individual genes that have broad effects, such as the multidrug resistant genes, mdr1 and mrp1 (P. Sonneveld, 2000, J. Intern. Med., 247:521-534). Several lines of pre-clinical research indicate that mRNA overexpression of selected genes can contribute to chemoresistance to gemcitabine, vinorelbine or paclitaxel, and it seems that pharmacogenomic assessment can help prolong time to progression through tailored chemotherapy (R. V. N. Lord et al., 2002, Clin. Cancer Res. 8:2286-2291 and R. Rosell et al., 2001, Curr. Opin. Oncol. 13:101-109).

[0006] The development of microarray technologies for large scale characterization of gene expression pattern makes it possible to systematically search for multiple molecular markers and to categorize cancers into distinct subgroups not evident by traditional histopathological methods (J. Khan et al., 1998, Cancer Res., 58:5009-5013; A. A. Alizadeh et al., 2000, Nature, 403:503-511; M. Bittner et al., 2000, Nature, 406:536-540; J. Khan et al., 2001, Nature Medicine, 7(6):673-679; and T. R. Golub et al., 1999, Science, 286:531-537; U. Alon et al., 1999, Proc. Natl. Acad. Sci. USA, 96:6745-6750). Such technologies and molecular tools have made it possible to monitor the expression level of a large number of transcripts within a cell at any given time (see, e.g., Schena et al., 1995, Science, 270:467-470; Lockhart et al., 1996, Nature Biotechnology, 14:1675-1680; Blanchard et al., 1996, Nature Biotechnology, 14:1649; U.S. Pat. No. 5,569,588, issued Oct. 29, 1996 to Ashby et al.).

[0007] How differential gene expression is associated with health and disease is a basis of functional genomics, which is defined as the study of all of the gene or polynucleotides expressed by a specific cell or a group of cells and the changes in their expression pattern during development, disease, or environmental exposure. Hybridization arrays, used to study polynucleotide expression, allow polynucleotide expression analysis on a genomic scale by permitting the examination of changes in expression of literally thousands of polynucleotides at one time. In general, for hybridization arrays, gene-specific sequences (probes) are immobilized on a solid state matrix. These sequences are then queried with labeled copies of nucleic acids from biological samples (targets). The underlying theory is that the greater the expression of a gene, the greater the amount of labeled target and thus, the greater output of signal for that gene and its encode polypeptide. (W. M. Freeman et al., 2000, BioTechniques), 29:1042-1055).

[0008] Recent studies demonstrate that gene expression information generated by microarray analysis of human tumors can predict clinical outcome (D. G. Beer et al., 2002, Nature Medicine, 8(8):816-824; L. J. van't Veer et al., 2002, Nature, 415:530-536; M. West et al., 2001, Proc. Natl. Acad. Sci. USA, 98:11462-11467; T. Sorlie et al., 2001, Proc. Natl. Acad. Sci. USA, 98:10869-10874; M. Shipp et al., 2002, Nature Medicine, 8(1):68-74). These findings bring hope that cancer treatment will be vastly improved by better predicting the response of individual tumors to therapy.

[0009] Needed in the art are new and alternative methods and procedures to determine drug sensitivity in patients, allowing the development of individualized genetic profiles which is necessary to treat diseases and disorders based on patient response at a molecular level. By using cultured cells as a model of in vivo effects, the present invention advantageously focuses on cell-intrinsic properties that are exposed in cell culture and involves identified genes that correlate with drug sensitivity. The presently described discovery and identification of polynucleotides/marker polynucleotides (predictor polynucleotides and predictor polynucleotide sets) in cell lines assayed in vitro can be used to correlate drug responses in vivo, and thus can be extended to clinical situations in which the same polynucleotide are used to predict responses to drugs and/or chemotherapeutic agents by patients.

### SUMMARY OF THE INVENTION

[0010] The present invention describes the identification of marker or polynucleotides whose expression levels are highly correlated with drug sensitivity in lung cell lines that are either sensitive or resistant to protein tyrosine kinase inhibitor compounds. More particularly, the protein tyrosine kinases that are inhibited in accordance with the present invention include members of the Src family of tyrosine kinases, for example, Src, Fgr, Fyn, Yes, Blk, Hck, Lck and Lyn, as well as other protein tyrosine kinases, including, Bcr-abl, Jak, PDGFR, c-kit and Eph receptors. For a review of these and other protein tyrosine kinases, see, for example, P. Blume-Jensen and T. Hunter, 2001, “Oncopolynucleotide Kinase Signaling”, Nature, 411:355-365. Some of these polynucleotides are also modulated by the tyrosine kinase inhibitor compounds, in particular, src/abl tyrosine kinase inhibitor compounds, which indicates their involvement in the protein tyrosine kinase signaling pathway. These polynucleotides or “markers” show utility in predicting a host's response to a drug and/or drug treatment.

[0011] It is an aspect of this invention to provide a cell culture model to identify markers or polynucleotides whose expression levels correlate with drug sensitivity of cells associated with a disease state, or with a host having a disease. In accordance with the present invention, oligonucleotide microarrays were utilized to measure the expression levels of a large number of polynucleotides in a panel of untreated cell lines, particularly lung cell lines, for which drug sensitivity to a protein tyrosine kinase inhibitor compound was determined. The determination of the polynucleotide expression profiles in the untreated cells allowed a prediction of chemosensitivity and the identification of markers/polynucleotides whose expression levels highly correlated with sensitivity to drugs or compounds that modulate, preferably inhibit, protein tyrosine kinase or the pathway in which the protein tyrosine kinase, e.g., src and/or abl tyrosine kinase, is involved. The marker polynucleotides are thus able to be utilized as one or more predictors to foresee a patient's response to drugs or drug treatments that directly or indirectly affect protein tyrosine kinase activity.

[0012] It is another aspect of the present invention to provide a method of determining or predicting if an individual requiring drug or chemotherapeutic treatment or therapy for a disease state, or a cancer or tumor of a particular type, e.g., a lung cancer or lung tumor, will successfully respond or will not respond to the drug or chemotherapeutic treatment or therapy prior to the administration of such treatment or chemotherapy. Preferably, the treatment or therapy involves a protein tyrosine kinase modulating agent, e.g., an inhibitor of the protein tyrosine kinase activity. The protein tyrosine kinases whose activities can be inhibited by inhibitor compounds according to this invention include, for example, members of the Src family of tyrosine kinases, for example, Src, Fgr, Fyn, Yes, Blk, Hck, Lck and Lyn, as well as other protein tyrosine kinases, including, Bcr-abl, Jak, PDGFR, c-kit and Eph receptors. Also in accordance with the present invention, cells from a patient tissue sample, e.g., a lung tumor or cancer biopsy, are assayed to determine their polynucleotide expression pattern prior to treatment with a protein tyrosine kinase modulating compound or drug, preferably a src and/or abl tyrosine kinase inhibitor. The resulting polynucleotide expression profile of the test cells before exposure to the compound or drug is compared with the polynucleotide expression pattern of the predictor set of polynucleotides that have been described and shown herein (Table 2). In addition, in such a method, the polynucleotide expression pattern of subsets of predictor polynucleotides, i.e., the sets of 15 and 40 polynucleotides as set forth in Tables 4-5, respectively, can also be used. These polynucleotides are derived from the control panel of the untreated cells that have been determined to be either resistant or sensitive to the drug or compound, i.e., FIG. 1 and Table 1.

[0013] Success or failure of treatment with a drug can be determined based on the polynucleotide expression pattern of cells from the test tissue (test cells), e.g., a tumor or cancer biopsy, as being relatively similar to or different from the polynucleotide expression pattern of the predictor set of polynucleotides. Thus, if the test cells show a polynucleotide expression profile which corresponds to that of the predictor set of polynucleotides in the control panel of cells which are sensitive to the drug or compound, it is highly likely or predicted that the individual's cancer or tumor will respond favorably to treatment with the drug or compound. By contrast, if the test cells show a polynucleotide expression pattern corresponding to that of the predictor set of polynucleotides of the control panel of cells which are resistant to the drug or compound, it is highly likely or predicted that the individual's cancer or tumor will not respond to treatment with the drug or compound.

[0014] It is a further aspect of this invention to provide screening assays for determining if a cancer patient will be susceptible or resistant to treatment with a drug or compound, particularly, a drug or compound directly or indirectly involved in a protein tyrosine kinase activity or a protein tyrosine kinase pathway. Such protein tyrosine kinases include, without limitation, members of the Src family of tyrosine kinases, for example, Src, Fgr, Fyn, Yes, Blk, Hck, Lck and Lyn, as well as other protein tyrosine kinases, including, Bcr-abl, Jak, PDGFR, c-kit and Eph receptors.

[0015] In a more particular aspect, the present invention provides screening assays for determining if a cancer patient will be susceptible or resistant to treatment with a drug or compound, particularly, a drug or compound directly or indirectly involved in src tyrosine kinase activity or the src tyrosine kinase pathway.

[0016] It is another aspect of the present invention to provide a method of monitoring the treatment of a patient having a disease treatable by a compound or agent that modulates a protein tyrosine kinase, including members of the Src family of tyrosine kinases, for example, Src, Fgr, Fyn, Yes, Blk, Hck, Lck and Lyn, as well as other protein tyrosine kinases, including, Bcr-abl, Jak, PDGFR, c-kit and Eph receptors. This can be accomplished by comparing the resistance or sensitivity polynucleotide expression profile of cells from a patient tissue sample, e.g., a tumor or cancer biopsy, e.g., a lung cancer or tumor sample, prior to treatment with a drug or compound that inhibits the protein tyrosine kinase activity and again following treatment with the drug or compound. The isolated test cells from the patient's tissue sample are assayed to determine their polynucleotide expression pattern before and after exposure to a compound or drug, such as, e.g., a src/abl tyrosine kinase inhibitor. The resulting polynucleotide expression profile of the test cells before and after treatment is compared with the polynucleotide expression pattern of the predictor set and subsets of polynucleotides that have been described and shown herein to be highly expressed in the control panel of cells that are either resistant or sensitive to the drug or compound. Thus, if a patient's response becomes one that is sensitive to treatment by a protein tyrosine kinase inhibitor compound, based on a correlation of the expression profile of the predictor polynucleotides, the patient's treatment prognosis can be qualified as favorable and treatment can continue. Also, if after treatment with a drug or compound, the test cells do not show a change in their polynucleotide expression profile that corresponds to the control panel of cells that are sensitive to the drug or compound, this can serve as an indicator that the current treatment should be modified, changed, or even discontinued. Such a monitoring process can indicate success or failure of a patient's treatment with a drug or compound, and the monitoring processes can be repeated as necessary or desired.

[0017] It is a further aspect of the present invention to provide predictor polynucleotides and predictor sets of polynucleotides having both diagnostic and prognostic value in disease areas in which signaling through a protein tyrosine kinase or a protein tyrosine kinase pathway is of importance, e.g., in cancers and tumors, in immunological disorders, conditions or dysfunctions, or in disease states in which cell signaling and/or proliferation controls are abnormal or aberrant. Such protein tyrosine kinases whose direct or indirect modulation can be associated with a disease state or condition, include members of the Src family of tyrosine kinases, for example, Src, Fgr, Fyn, Yes, Blk, Hck, Lck and Lyn, as well as other protein tyrosine kinases, including, Bcr-abl, Jak, PDGFR, c-kit and Eph receptors. In accordance with this invention, the use of predictor polynucleotides, or a predictor polynucleotide set or subset (such as the predictor polynucleotides of Table 2, and the predictor polynucleotide subsets of Tables 4-5) is to forecast or foretell an outcome prior to having any knowledge about a biological system, or a cellular response.

[0018] It is yet another aspect of the present invention to assemble polynucleotides, such as those listed in Table 2, or the subset of polynucleotides as listed in Tables 4-5, that highly correlate with resistance or sensitivity to protein tyrosine kinase inhibitor drugs or compounds, into predictor polynucleotide sets, so as to predict, or reasonably foretell the effect of either the protein tyrosine inhibitor compounds, or compounds that affect the protein tyrosine kinase signaling pathway(s) in different biological systems, or for cellular responses. The predictor polynucleotide sets can be used in in vitro assays of drug response by test cells to predict in vivo outcome. In accordance with this invention, the various predictor polynucleotide sets described herein, or the combination of these predictor sets with other polynucleotides or other co-variants of these polynucleotides, can be used, for example, to predict how patients with cancer or a tumor might respond to therapeutic intervention with compounds that modulate protein tyrosine kinases, or modulate signaling through an entire protein tyrosine kinase regulatory pathway. The predictor sets of polynucleotides, or co-variants of these polynucleotides, can be used to predict how patients with a cancer or tumor respond to therapy employing compounds that modulate a tyrosine kinase, or the activity of a tyrosine kinase, such as protein tyrosine kinase members of the Src family, for example, Src, Fgr, Fyn, Yes, Blk, Hck, Lck and Lyn, as well as other protein tyrosine kinases, including, Bcr-abl, Jak, PDGFR, c-kit and Eph receptors.

[0019] Another object of the present invention is to provide one or more specialized microarrays, e.g., oligonucleotide microarrays or cDNA microarrays, comprising those polynucleotides or combinations thereof, as described herein, showing expression profiles that correlate with either sensitivity or resistance to protein tyrosine kinase inhibitor compounds. Such microarrays can be employed in in vitro assays for assessing the expression level of the polynucleotides on the microarrays in the test cells from tumor biopsies, for example, and determining whether these test cells will be likely to be resistant or sensitive to the protein tyrosine kinase inhibitor compound(s). For example, a specialized microarray can be prepared using some or all of the polynucleotides, polynucleotide subsets, or combinations thereof, as described herein and shown in Tables 2, 4 and 5. Cells from a tissue or organ biopsy can be isolated and exposed to one or more inhibitor compounds. Following application of nucleic acids isolated from both untreated and treated cells to one or more of the specialized microarrays, the pattern of polynucleotide expression of the tested cells can be determined and compared with that of the predictor polynucleotide pattern from the control panel of cells used to create the predictor polynucleotide set on the microarray. Based upon the polynucleotide expression pattern results from the cells undergoing testing, it can be determined if the cells show a resistant or a sensitive profile of polynucleotide expression. Whether or not the tested cells from a tissue or organ biopsy will respond to a protein tyrosine kinase inhibitor compound, and the course of treatment or therapy, can then be determined or evaluated based on the information gleaned from the results of the specialized microarray analysis.

[0020] It is a further aspect of the present invention to provide a kit for determining or predicting drug susceptibility or resistance by a patient having a disease, with particular regard to a cancer or tumor, namely, a lung cancer or tumor. Such kits are useful in a clinical setting for testing a patient's biopsied tumor or cancer sample, for example, to determine or predict if the patient's tumor or cancer will be resistant or sensitive to a given treatment or therapy with a drug, compound, chemotherapy agent, or biological agent that is directly or indirectly involved with modification, preferably, inhibition, of the activity of a protein tyrosine kinase or a cell signaling pathway involving protein tyrosine kinase activity. Provided in the kit are one or more microarrays, e.g., oligonucleotide microarrays or cDNA microarrays, comprising those polynucleotides that correlate with resistance and sensitivity to protein tyrosine kinase modulators, particularly, inhibitors of members of the Src family of protein tyrosine kinases, for example, Src, Fgr, Fyn, Yes, Blk, Hck, Lck and Lyn, as well as inhibitors of the Bcr-abl, Jak, PDGFR, c-kit and Eph receptors protein tyrosine kinases; and, in suitable containers, the modulator agents/compounds for use in testing cells from patient tissue specimens or patient samples; and instructions for use. In addition, kits contemplated by the present invention can include reagents or materials for the monitoring of the expression of the predictor or marker polynucleotides of the invention at the level of mRNA or protein, using other techniques and systems practiced in the art, e.g., RT-PCR assays, which employ primers designed on the basis of one or more of the predictor polynucleotides described herein, immunoassays, such as enzyme linked immunosorbent assays (ELISAs), immunohistochemistry (IHC), immunoblotting, e.g., Western blots, or in situ hybridization, and the like, as further described herein. The kits according to the present invention can also comprise predictor polynucleotides as set forth in Table 2, and/or one or more of the predictor polynucleotide subsets as presented in Tables 4-5 herein.

[0021] Another aspect of the present invention is to provide one or more polynucleotides among those of the predictor polynucleotides identified herein that can serve as targets for the development of drug therapies for disease treatment. Such targets can be particularly applicable to treatment of lung disease, such as lung cancers or tumors. Because these predictor polynucleotides are differentially expressed in sensitive and resistant cells, their expression pattern is correlated with the relative intrinsic sensitivity of cells to treatment with compounds that interact with and/or inhibit protein tyrosine kinases, including members of the Src family of protein tyrosine kinases, for example, Src, Fgr, Fyn, Yes, Blk, Hck, Lck and Lyn, as well as the Bcr-abl, Jak, PDGFR, c-kit and Eph receptors protein tyrosine kinases. Accordingly, the polynucleotides highly expressed in resistant cells can serve as targets for the development of new drug therapies for those tumors which are resistant to protein tyrosine kinase inhibitor compounds.

[0022] Yet another object of the present invention is to provide antibodies, either polyclonal or monoclonal, directed against one or more of the protein tyrosine kinase biomarker polypeptides, or peptides thereof, encoded by the predictor polynucleotides. Such antibodies can be used in a variety of ways, for example, to purify, detect, and target the protein tyrosine kinase biomarker polypeptides of the present invention, including both in vitro and in vivo diagnostic, detection, screening, and/or therapeutic methods, and the like. Included among the protein tyrosine kinase biomarker polypeptides of this invention are members of the Src family of protein tyrosine kinases, for example, Src, Fgr, Fyn, Yes, Blk, Hck, Lck and Lyn, as well as the Bcr-abl, Jak, PDGFR, c-kit and Eph receptors protein tyrosine kinases.

[0023] Yet another object of the present invention is to provide antisense reagents, including siRNA, RNAi, and ribozyme reagents, directed against one or more of the protein tyrosine kinase biomarker polypeptides, or peptides thereof, encoded by the predictor polynucleotides. Such antisense reagents can be used in a variety of ways, for example, to detect, to target, and inhibit the expression of the protein tyrosine kinase biomarker polypeptides of the present invention, including both in vitro and in vivo diagnostic, detection, screening, and/or therapeutic methods, and the like. Included among the protein tyrosine kinase biomarker polypeptides of this invention are members of the Src family of protein tyrosine kinases, for example, Src, Fgr, Fyn, Yes, Blk, Hck, Lck and Lyn, as well as the Bcr-abl, Jak, PDGFR, c-kit and Eph receptors protein tyrosine kinases.

[0024] The invention also relates to an antisense compound 8 to 30 nucleotides in length that specifically hybridizes to a nucleic acid molecule encoding the human protein tyrosine kinase biomarker polypeptides of the present invention, wherein said antisense compound inhibits the expression of the human protein tyrosine kinase biomarker polypeptides.

[0025] The invention further relates to a method of inhibiting the expression of the human protein tyrosine kinase biomarker polypeptides of the present invention in human cells or tissues comprising contacting said cells or tissues in vitro, or in vivo, with an antisense compound of the present invention so that expression of the protein tyrosine kinase biomarker polypeptides is inhibited.

[0026] The present invention is also directed to a method of identifying a compound that modulates the biological activity of protein tyrosine kinase biomarker polypeptides, comprising the steps of, (a) combining a candidate modulator compound with protein tyrosine kinase biomarker polypeptides in the presence of an antisense molecule that antagonizes the activity of the protein tyrosine kinase biomarker polypeptides selected from the group consisting of SEQ ID NO:504 thru 527, and (b) identifying candidate compounds that reverse the antagonizing effect of the peptide.

[0027] The present invention is also directed to a method of identifying a compound that modulates the biological activity of protein tyrosine kinase biomarker polypeptides, comprising the steps of, (a) combining a candidate modulator compound with protein tyrosine kinase biomarker polypeptides in the presence of a small molecule that antagonizes the activity of the protein tyrosine kinase biomarker polypeptides selected from the group consisting of SEQ ID NO: 504 thru 527, and (b) identifying candidate compounds that reverse the antagonizing effect of the peptide.

[0028] The present invention is also directed to a method of identifying a compound that modulates the biological activity of protein tyrosine kinase biomarker polypeptides, comprising the steps of, (a) combining a candidate modulator compound with protein tyrosine kinase biomarker polypeptides in the presence of a small molecule that agonizes the activity of the protein tyrosine kinase biomarker polypeptides selected from the group consisting of SEQ ID NO: 504 thru 527, and (b) identifying candidate compounds that reverse the agonizing effect of the peptide.

[0029] Further aspects, features, and advantages of the present invention will be better appreciated upon a reading of the detailed description of the invention when considered in connection with the accompanying figures or drawings.

### DESCRIPTION OF THE FIGURES

[0030] The file of this patent application contains at least one Figure executed in color. Copies of this patent with color Figure(s) will be provided by the Patent and Trademark Office upon request and payment of the necessary fee.

[0031] FIG. 1 illustrates a schematic representation of the expression pattern observed for 129 polynucleotides that highly correlated with a resistance/sensitivity phenotype classification of 23 lung cell lines subjected to treatment with the protein tyrosine kinase inhibitor compound BMS-A is shown. Each row corresponds to a polynucleotide, with the columns corresponding to expression level in the different cell lines. Expression levels for each polynucleotide were normalized across all 23 lung cell lines such that the median was 0 and the standard derivation was 1. Expression levels greater than the median are shaded in red, while those expression levels below the mean are shaded in green. The individual polynucleotides encoding the protein tyrosine kinase biomarkers of the present invention are indicated at the right (details of the inventive biomarkers are also shown in Table 2). Cell lines labeled in red are classified as resistant to BMS-A, while those labeled in blue are classified as sensitive to BMS-A according to their IC50.

[0032] FIG. 2 shows the error rates for the protein tyrosine kinase inhibitor compound BMS-A in cross validation tests. Genecluster software (Whitehead Institute; T. R. Golub et al., 1999, Science, 286:531-537) was used to select polynucleotides and predict classifications using a “weighted-voting ‘leave one out’ cross-validation algorithm”, as described herein. The x-axis represents the number of polynucleotides comprising the predictor set used in the prediction; the y-axis represents the error rate, viewed as a percentage, observed for each predictor set prediction. A different number of polynucleotides was used in each predictor set. As shown, when a predictor set contained either 15 or 40 polynucleotides, the error rate of the leave-one-out cross validation tests for predicting sensitivity of BMS-A in the 23 lung cell lines was 26% and 22% respectively. In contrast, the real error rates ranged from 34% to 88% when the same number of polynucleotides in a predictor set was used in 20 cases in which classification for the lung cell lines was randomly assigned. This result demonstrates that the error rate value for predicting sensitivity of BMS-A in the 23 lung cell lines is significantly lower than the error rate for predicting sensitivity for the 23 lung cell lines when their classification is randomly assigned in 20 cases.

### DESCRIPTION OF THE TABLES

[0033] Table 1 presents the resistance/sensitivity phenotype classification of the 23 lung cell lines for the protein tyrosine kinase inhibitor compound BMS-A based on the IC₅₀ results. The IC₅₀ for each cell line was assessed by MTS assays as described in Example 1 (Methods). The mean IC₅₀ values along with standard deviations (SD) were calculated from 2 to 5 individual determinations for each cell line as shown. The IC₅₀ unit was μM. The mean IC₅₀ across the 23 lung cell lines for BMS-A was calculated and used to make sensitivity classifications for each cell line. The cell lines having an IC₅₀ below the mean IC₅₀ were defined as sensitive to the compound, while those having an IC₅₀ above the mean IC₅₀ were considered to be resistant.

[0034] Table 2 shows a polynucleotide list that was based upon the results of three analysis algorithms that demonstrated a high correlation between the expression pattern of each listed polynucleotide with its value in predicting the resistance/sensitivity classification for the BMS-A compound. The polynucleotide number, relative expression pattern, i.e., sensitive or resistant, Genbank Accession number, polynucleotide description (unigene cluster), SEQ ID NO: for the DNA sequence of the polynucleotide, SEQ ID NO: for the amino acid sequence encoded by the polynucleotide (where available), and SWISS-PROT Accession No. protein ID, are presented.

[0035] Table 3 presents a real prediction of resistance/sensitivity for BMS-A in 23 lung cell lines using a Weighted Voting algorithm. The true class is assigned in accordance with the assignments provided in Table 1, based on the IC₅₀ results. The predicted class is determined by using the optimal 15 polynucleotides (see Table 4) or 40 polynucleotides (see Table 5) as the predictor set to predict the resistance or sensitive class. “S” represents Sensitive; “R” represents Resistant. The PS score refers to the prediction strength for each prediction made on a cell line by the predictor set. The PS score ranges from 0 to 1, i.e., corresponding from low to high confidence in making the prediction. The error predictions are indicated by an asterisk (“*”).

[0036] Table 4 lists the predictor set of 15 polynucleotides used in the predictions shown in Table 3. These 15 polynucleotides were included in the 129 polynucleotides derived from three analysis methods shown in Table 2. The relative expression patterns, i.e., sensitive or resistant, polynucleotide descriptions, and Unigene cluster numbers for the polynucleotides comprising this 15 predictor polynucleotide subset are indicated in Table 4.

[0037] Table 5 lists the predictor set of 40 polynucleotides used in the predictions shown in Table 3. These 40 polynucleotides were included in the 129 polynucleotides derived from the three analysis methods shown in Table 2. The relative expression patterns, i.e., sensitive or resistant, polynucleotide descriptions, and Unigene cluster numbers for the polynucleotides comprising this 40 predictor polynucleotide subset are indicated in Table 5.

[0038] Table 6 lists the representative RT-PCR primer sets for each of the protein tyrosine kinase biomarker polynucleotides of the present invention. The SEQ ID NO: for each RT-PCR primer is provided (SEQ ID NO:243 thru 500).

### BRIEF DESCRIPTION OF THE SEQUENCE LISTING

[0039] Incorporated herein by reference in its entirety is a Sequence Listing, comprising SEQ ID NO:1 through SEQ ID NO:527, which includes nucleic acid and amino acid sequences of the protein tyrosine kinase biomarkers of the present invention as presented in Table 2 herein and the nucleotide sequences of forward and reverse primer pairs for the polynucleotide markers, probes, and RNAi reagents as described herein. The Sequence Listing is contained on a compact disc, i.e., CD-ROM, three identical copies of which are filed herewith. The Sequence Listing, in IBM/PC MS-DOS text format, was first created on Jun. 21, 2005, and is 1010 KB in size.

### DETAILED DESCRIPTION OF THE INVENTION

[0040] The present invention describes the identification of polynucleotides that correlate with drug sensitivity or resistance of untreated cell lines to determine or predict sensitivity of the cells to a drug, compound, or biological agent. These polynucleotides, called marker or predictor polynucleotides herein, can be employed for predicting drug response. The marker polynucleotides have been determined in an in vitro assay employing microarray technology to monitor simultaneously the expression pattern of thousands of discrete polynucleotides in untreated cells, whose sensitivity to compounds or drugs, in particular, compounds that modulate, e.g., inhibit, protein tyrosine kinase or protein tyrosine kinase activity, is tested. The protein tyrosine kinases, or activities thereof, associated with response to a drug, compound, or biological agent include, for example, members of the Src family of protein tyrosine kinases, for example, Src, Fgr, Fyn, Yes, Blk, Hck, Lck and Lyn, as well as the Bcr-abl, Jak, PDGFR, c-kit and Eph receptors protein tyrosine kinases. (See, e.g., P. Blume-Jensen and T. Hunter, 2001, “Oncopolynucleotide Kinase Signaling”, Nature, 411:355-365; the contents of which, including the list of protein tyrosine kinases, is incorporated by reference herein).

[0041] The assay according to the present invention has allowed the identification of the marker polynucleotides, called protein tyrosine kinase biomarkers herein, having expression levels in the cells that are highly correlated with drug sensitivity exhibited by the cells in response to a protein tyrosine kinase inhibitor. Such marker polynucleotides encompass the above-listed protein tyrosine kinase-encoding polynucleotides, and serve as useful molecular tools for predicting a response to drugs, compounds, biological agents, chemotherapeutic agents, and the like, preferably those drugs and compounds, and the like, that affect protein tyrosine kinase activity via direct or indirect inhibition or antagonism of the protein tyrosine kinase function or activity.

[0042] In one aspect, the present invention describes polynucleotides that correlate with sensitivity or resistance of lung cell lines to treatment with a protein tyrosine kinase inhibitor compound, e.g., BMS-A, as described herein. (see FIG. 1 and Table 2). The protein tyrosine kinase inhibitor compound, BMS-A, utilized for identifying the polynucleotide predictor sets of this invention, was described in WO 00/62778, published Oct. 26, 2000, and is hereby incorporated by reference in its entirety. BMS-A has potent inhibitory activity for a number of protein tyrosine kinases, for example, members of the Src family of protein tyrosine kinases, including Src, Fgr, Fyn, Yes, Blk, Hck, Lck and Lyn, as well as the Bcr-abl, Jak, PDGFR, c-kit and Eph receptors protein tyrosine kinases. Specifically, for the BMS-A protein tyrosine kinase inhibitor compound analyzed, the expression of 129 predictor polynucleotides was found to correlate with resistance/sensitivity of the lung cell lines to the compound.

[0043] Wherever the term “BMS-A” is used herein, it is understood (unless otherwise indicated) that the compound ′N-(2-chloro-6-methylphenyl)-2-[[6-[4-(2-hydroxyethyl)-1-piperazinyl]-2-methyl-4-pyrimidinyl]amino]-5-thiazolecarboxamide having the following structure (I): [chemical structure]
is intended, as well as all pharmaceutically acceptable salts thereof. Use of the term encompasses (unless otherwise indicated) solvates (including hydrates) and polymorphic forms of the compound (I) or its salts (such as the monohydrate form of (I) described in U.S. Ser. No. 11/051,208, filed Feb. 4, 2005, incorporated herein by reference).

[0044] The skilled artisan would recognize that the biomarker polypeptides disclosed herein are not only useful for predicting sensitivity/resistence in cells, tissues, and/or patients for BMS-A, but also any other protein tyrosine kinase inhibitor known in the art or otherwise described herein.

[0045] In accordance with the invention, an approach has been discovered in which polynucleotides and combinations of polynucleotides have been identified whose expression pattern, in a subset of cell lines, correlates to and can be used as, an in vitro predictor of cellular response to treatment or therapy with one compound, or with a combination or series of compounds, that are known to inhibit or activate the function of a protein, enzyme, or molecule (e.g., a receptor) that is directly or indirectly involved in cell proliferation, cell responses to external stimuli, (such as ligand binding), or signal transduction, e.g., a protein tyrosine kinase. Preferred are antagonists or inhibitors of the function of a given protein, e.g., a protein tyrosine kinase.

[0046] In one aspect, the BMS-A protein tyrosine kinase inhibitor was employed to determine drug sensitivity in a panel of lung cell lines following exposure of the cells to this compound. Some of the cell lines were determined to be resistant to treatment with the inhibitor compound, while others were determined to be sensitive to the inhibitor. (see Table 1). A subset of the cell lines examined provided an expression pattern or profile of polynucleotides, and combinations of polynucleotides, that correlated to, and thus serve as a predictor of, a response by the cells to the inhibitor compound, and to compounds having similar modes of action and/or structure. (see FIG. 1 and Tables 2 and 4-5).

[0047] Such a predictor set of cellular polynucleotide expression patterns correlating with sensitivity or resistance of cells following exposure of the cells to a drug, or a combination of drugs, provides a useful tool for screening a cancer, tumor, or patient test sample before treatment with the drug or a drug combination. The screening technique allows a prediction of cells of a cancer, tumor, or test sample exposed to a drug, or a combination of drugs, based on the polynucleotide expression results of the predictor set, as to whether or not the cancer, tumor, or test sample, and hence a patient harboring the cancer and/or tumor, will or will not respond to treatment with the drug or drug combination. In addition, the predictor polynucleotides or predictor polynucleotide set can also be utilized as described herein for monitoring the progress of disease treatment or therapy in those patients undergoing treatment involving a protein tyrosine kinase, e.g., src tyrosine kinase, inhibitor compound or chemotherapeutic agent for a disease, e.g., lung cancer.

[0048] According to a particular embodiment of the present invention, oligonucleotide microarrays were utilized to measure the expression levels of over 44,792 probe sets in a panel of 23 untreated lung cell lines for which the drug sensitivity to the protein tyrosine kinase inhibitor compound was determined. This analysis was performed to determine whether the polynucleotide expression signatures of untreated cells were sufficient for the prediction of chemosensitivity. Data analysis allowed the identification of marker polynucleotides whose expression levels were found to be highly correlated with drug sensitivity. In addition, the treatment of cells with the BMS-A protein tyrosine kinase inhibitor compound also provided polynucleotide expression signatures predictive of sensitivity to the compound. Thus, in one of its embodiments, the present invention provides these polynucleotides, i.e., polynucleotide “markers” or “biomarkers” or “predictors”, which show utility in predicting drug response upon treatment or exposure of cells to a drug. In particular, the marker or predictor polynucleotides are protein tyrosine kinase biomarkerspolynucleotides encoding protein tyrosine kinase biomarker proteins/polypeptides, such as a src tyrosine kinase inhibitor biomarker.

[0049] The performance of the polynucleotide expression and marker polynucleotide identification analyses embraced by the present invention is described in further detail and without limitation herein below.

### IC₅₀ Determination and Phenotype Classification Based on Sensitivity of Twenty-Three Lung Cell Lines to Src Tyrosine Kinase Inhibitor Compounds

[0050] Twenty-three lung cell lines were treated with a protein tyrosine kinase inhibitor compound (i.e., BMS-A) to determine the individual IC₅₀ value. The average IC₅₀ values, along with standard deviations, were calculated from 2 to 5 individual determinations for each cell line. As shown in Table 1, a large variation in the IC₅₀ values (at least >100-fold) was observed for the compound among the twenty-three lung cell lines.

[0051] The mean IC₅₀ across the twenty-three lung cell lines was calculated for the compound. The cell lines with a IC₅₀ below the mean IC₅₀ were classified as sensitive to the compound, and those with a IC₅₀ above the mean IC₅₀ were classified as resistant. Table 1 presents the resistance/sensitivity classifications of the twenty-three lung cell lines to the BMS-A compound. As observed in Table 1, eleven cell lines were classified as sensitive and twelve cell lines were classified as resistant to the protein tyrosine kinase inhibitor compound.

### Identifying Polynucleotides that Significantly Correlated with Drug Resistance/Sensitivity Classification

[0052] Expression profiling data of 44,792 probe sets represented on the HG-U133 array set for twenty-three untreated lung cell lines were obtained and preprocessed as described in Example 1, Methods. The preprocessed data containing 4797 polynucleotides were analyzed using K-mean Nearest Neighborhood (KNN) algorithm and “signal to noise model” (T. R. Golub et al., 1999, Science, 286:531-537) to identify polynucleotides whose expression patterns were strongly correlated with the drug resistance/sensitivity classification (Table 1). An “idealized expression pattern” corresponds to a polynucleotide that is uniformly high in one class (e.g., sensitive) and uniformly low in the other class (e.g., resistant). Initially, a KNN analysis was performed in which a correlation coefficient was obtained for each polynucleotide using “signal to noise model”. The correlation coefficient, which is a measure of relative classification separation, is obtained using the following formula:
P(g,c)=(μ1−μ2)/(σ1+σ2).

[0053] In the above formula, for P(g,c), P represents correlation coefficient between expression for polynucleotide, g, and the sensitivity/resistance classification, c; μ1 represents the median polynucleotide expression level of samples in class 1; μ2 represents the median polynucleotide expression level of samples in class 2; σ1 represents the standard deviation of polynucleotide expression for samples in class 1; and σ2 represents the standard deviation of polynucleotide expression for samples in class 2.

[0054] Large values of P(g,c) indicate a strong correlation between polynucleotide expression and resistance/sensitivity classification. When the correlation is compared to that of a random permutation test (randomly assigned classification), a significance measurement p-value is obtained. Then, the polynucleotides can be ranked according to the correlation coefficient obtained from this analysis, with the highest value indicating the best correlation of polynucleotide expression level with the resistance/sensitivity classification to the protein tyrosine kinase inhibitor compound in the twenty-three lung cell lines.

[0055] The KNN analysis demonstrated that hundreds of polynucleotides correlated to the drug resistance/sensitivity classification for the compound. Therefore, for greater stringency and higher levels of predictability, three different methods were applied to select a smaller subset of polynucleotides that correlated with the drug resistance/sensitive classification for the compound:

[0056] First, a permutation test was performed to calculate the significance of the correlation coefficients obtained in the above-described KNN analysis. The top 400 polynucleotides whose ‘p’ value was less than or equal to 0.05 were selected. Second, Welch t-test was performed, the polynucleotides with p-values equal to or less than 0.05 were selected. This resulted in 245 polynucleotides or markers. Finally, the Pearson correlation coefficient (a dimensionless index that ranges from −1.0 to 1.0), was calculated, in which the IC₅₀ data were considered as a continuous variable and a linear regression model was utilized to correlate polynucleotide expression level with IC₅₀ values for the twenty-three lung cell lines. Those polynucleotides with a correlation coefficient greater than 0.34 or less than −0.34 were selected (p<0.05).

[0057] When the three analyses were performed to select polynucleotides that correlated with the drug resistance/sensitivity classification for compound BMS-A, the polynucleotide lists from the three analysis methods were obtained and compared. It was observed that there were 150 polynucleotides that overlapped from the three analyses. Of these, 21 polynucleotides were redundantly represented more than once on the 150 polynucleotide list. Removal of the redundant copies of each polynucleotide resulted in a total of 129 unique polynucleotides which are listed in Table 2. Out of the 129 predictor polynucleotides, 81 polynucleotides highly expressed in the cell lines were classified as sensitive to BMS-A, while 48 polynucleotides were highly expressed in the cell lines were classified as resistant to BMS-A.

### Identification of Polynucleotides Modulated by Drug Treatment

[0058] To identify polynucleotides regulated by a protein tyrosine kinase inhibitor compound, e.g., BMS-A, a lung cell line A549 was treated with or without the BMS-A compound (0.4 μM) in 0.1% DMSO for 4 and 24 hours. Expression profiling was performed, and the data were analyzed using GeneChip® Expression Analysis software MAS 5.0 (Affymetrix, Santa Clara, Calif.). The polynucleotide expression of a cell line treated with drug was compared using pair-wise analysis to the polynucleotide expression of the cell line without drug treatment. A change in p-value was calculated, indicating an increase, decrease or no change in polynucleotide expression. When the p-value was less than 0.0025, the change was considered significant. Duplicated experiments were performed, and analysis of 4 cross comparisons were performed. Polynucleotides that had a significant increase or decrease in response to BMS-A treatment in 3 out 4 cross comparisons, was considered to be modulated by the drug. As shown in Table 2, sixteen genes were determined to be modulated by the drug BMS-A.

[0059] The identification of those polynucleotides whose expression levels that not only correlated with the sensitivity or resistance of lung cell lines to treatment with a protein tyrosine kinase inhibitor compound (e.g., BMS-A), but also regulated or modified by treatment with the compound, can provide additional information about biological function or activity of each polynucleotide. Since the expression levels of these polynucleotides are regulated by a protein tyrosone kinase inhibitor, these polynucleotides are likely to be directly or indirectly involved in one or more protein tyrosine kinase signaling pathways, for example, protein tyrosine kinases that are members of the Src family of tyrosine kinases, including Src, Fgr, Fyn, Yes, Blk, Hck, Lck and Lyn, as well as other protein tyrosine kinases, including, Bcr-abl, Jak, PDGFR, c-kit and Eph receptors.

### Utility of Highly Correlated Polynucleotides to Make Predictions

[0060] Polynucleotides that correlate to a specific property of a biological system can be used to make predictions about that biological system and other biological systems. The Genecluster software or other programs can be used to select polynucleotides and combinations of polynucleotides that can predict properties using a “weighted-voting cross-validation algorithm” (T. R. Golub et al., 1999, Science, 286:531-537). In particular, the Genecluster software was used to build predictors that demonstrate the utility of polynucleotides that correlate to drug sensitivity and resistance. As used herein, the terms “predictor” or “predictor sets” are used as follows: a predictor or a predictor set refers to a single polynucleotide, or combination of polynucleotides, whose expression pattern or properties can be used to make predictions, with different error rates, about a property or characteristic of any given biological system.

[0061] The ability of polynucleotide expression patterns to predict a resistance/sensitive classification was further investigated using a “weighted-voting cross-validation algorithm” which uses a leave one out cross-validation strategy as described by T. R. Golub et al., 1999, Science, 286:531-537. The program was formatted to select the optimal number of polynucleotides whose expression pattern could be used to predict, with optimal accuracy, the classification of a cell line based on resistance or sensitivity toward a given protein tyrosine kinase inhibitor compound, e.g., BMS-A. A brief description of the cross-validation strategy of the program is described.

[0062] Based on the leave-one-out cross-validation strategy, a total of twenty-three prediction analyses (i.e., the number of cell lines in the data set) were performed in an iterative manner and the results of all twenty-three prediction analyses were combined to select the optimal number of polynucleotides that had optimal predictive accuracy. In each separate prediction analysis, one cell line was withheld from the data set, and an optimal number polynucleotide predictor was built, based on the remaining twenty-two cell lines, and was subsequently used to predict the class of the withheld sample.

[0063] FIG. 2 shows the real error rates using different numbers of polynucleotides in the predictor set for predicting classes among the lung cell lines which were either resistant or sensitive to BMS-A. When the predictor set consisted of 15 polynucleotides, an error rate of 26% was achieved in the cross-validation tests. Another predictor set consisting of 40 polynucleotides was determined to have an error rate of 22% in the cross-validation tests.

[0064] The real error rates for predicting the sensitivity class of lung cell lines to BMS-A were compared with the real error rates using the same number of polynucleotides as the predictor set in 20 cases in which classification for the lung cell lines was randomly assigned. As shown in FIG. 2, the real error rates ranged from 30% to 88% when using the same number of polynucleotides for the predictor set in 20 cases in which classification for the lung cell lines was randomly assigned. This result demonstrated that the error rate value for predicting sensitivity to BMS-A in 23 lung cell lines was significantly lower than the error rate for predicting randomly assigned classification.

[0065] Table 3 shows the prediction accuracy of the optimal 15 (Table 4) and 40 (Table 5) polynucleotide predictor sets for the resistance/sensitive classification of the twenty-three lung cell lines to BMS-A in the real prediction tests. When both 15 and 40 polynucleotide predictor sets were used in real prediction, twenty-two out of twenty-three samples were correctly predicted and one resistant cell lines, H2347 was predicted to be sensitive to BMS-A. This resulted in a 4.2% real error rate, calculated as follows:

$$\frac{( 1 / 12 resistant + 0 / 11 sensitive )}{2} \times 100 \% )$$

[0066] In addition, a Prediction Strength (“PS”) score for each prediction made on a cell line by the predictor set can be obtained from the Genecluster software. The “PS” score ranges from 0 to 1, measuring the margin of victory in each prediction using weighted-voting cross-validation algorithm (see, e.g., T. R. Golub et al., 1999, Science, 286:531-537). The higher the value of a PS score is, the more confident the prediction make. The PS score values for each cell line using the optimal 15 or 40 polynucleotide predictor set, obtained as described above for BMS-A, are shown in Table 3. Note that even though the cell line H2347 was predicted correct to be sensitivet with both the 15 and 40 polynucleotide predictor sets, the PS score was low, which means the confidence of prediction is low.

[0067] It will be appreciated that the exact number of polynucleotides that should comprise an optimal predictor set is not particularly established or defined. It is unlikely in the real world that any predictor set can be obtained with 100% or absolute accuracy. This is due to the fact that there is a trade-off between the amount of additional information and robustness that are gained by adding more polynucleotides, and the amount of noise that is concomitantly added. In accordance with the present invention, different numbers of polynucleotides were tested in the predictor sets; data were obtained and analyzed for a protein tyrosine kinase inhibitor, BMS-A. The selection of marker polynucleotides for use in the prediction set was well within the total number of polynucleotides, as shown in Table 2, that strongly correlated with the sensitivity class distinction.

[0068] Thus, in accordance with the present invention, an approach has been developed in which polynucleotides and combinations of polynucleotides have been discovered whose expression pattern in a subset of cell lines correlates with, and can be used as a predictor of, response to treatment with compounds that inhibit the function of protein tyrosine kinases.

### Predictor Sets, Error Rates and Algorithms Used to Demonstrate Utility

[0069] The number of polynucleotides in any given predictor or predictor set may influence the error rate of the predictor set in cross validation experiments and with other mathematical algorithms. The data show that the error rate of a predictor is somewhat dependent on the number of polynucleotides in the predictor set and the contribution of each individual polynucleotide in the given predictor set and the number of cell lines that are tested in the cross validation experiment. For example, in a given predictor set, one polynucleotide may contribute more significantly than other polynucleotides to the prediction.

[0070] It is very likely that if a polynucleotide significantly contributes to a predictor set, then it can be used in different combinations with other polynucleotides to achieve different error rates in different predictor sets. For example, polynucleotide A alone gives an error rate of 30%. In combination with polynucleotides, B, C and D, the error rate becomes 10%; in combination with polynucleotides B, D and E, the error rate becomes 12%; while a combination of polynucleotide A with polynucleotides E-X gives an error rate of 8%, and so on. As demonstrated in FIG. 5, different selection and combination of polynucleotides in a predictor set achieve different error rates in the cross-validation tests.

[0071] The error rates as described herein apply to the set of cell lines used in the cross-validation experiment. If a different set is used, or more cell lines are added to the original set tested, then different error rates may be obtained as described and understood by the skilled practitioner. Importantly, different combinations of polynucleotides that correlate to drug sensitivity can be used to build predictors with different prediction accuracy.

### Applications of Predictor Sets

[0072] Predictor sets with different error rates can be used in different applications. Predictor sets can be built from any combination of the polynucleotides listed in Table 2, or the predictor polynucleotide subsets of 15 and 40 polynucleotides, as presented in each of Tables 4 and 5, respectively, to make predictions about the likely effect of protein tyrosine modulator compounds, e.g., inhibitors, or compounds that affect a protein tyrosine kinase signaling pathway in different biological systems. The various predictor sets described herein, or the combination of these predictor sets with other polynucleotides or other co-variants of these polynucleotides, can have broad utility. For example, the predictor sets can be used as diagnostic or prognostic indicators in disease management; they can be used to predict how patients with cancer might respond to therapeutic intervention with compounds that modulate the protein tyrosine kinase family (e.g., the src tyrosine kinase family); and they can be used to predict how patients might respond to therapeutic intervention that modulate signaling through an entire protein tyrosine kinase regulatory pathway, such as, for example, the src tyrosine kinase regulatory pathway.

[0073] While the data described herein were generated in cell lines that are routinely used to screen for and identify compounds that have potential utility for cancer therapy, the predictors can have both diagnostic and prognostic value in other diseases areas in which signaling through a protein tyrosine kinase or a protein tyrosine kinase pathway is of importance, e.g., in immunology, or in cancers or tumors in which cell signaling and/or proliferation controls have gone awry. Such protein tyrosine kinases and their pathways comprise, for example, members of the Src family of tyrosine kinases, for example, Src, Fgr, Fyn, Yes, Blk, Hck, Lck and Lyn, as well as other protein tyrosine kinases, including, Bcr-abl, Jak, PDGFR, c-kit and Eph receptors. Although the data described herein have been generated using the particularly exemplified protein tyrosine kinase inhibitor compound, BMS-A, three other protein tyrosine kinase inhibitor compounds were tested in addition to BMS-A and were found to have similar sensitivity and resistance classifications in the 23 lung cell lines evaluated. Thus, the predictors can have both diagnostic and prognostic value related to other inhibitor molecules, as well as any molecules or therapeutic interventions that affect protein tyrosine kinases, such as Src tyrosine kinase, or a protein tyrosine kinase signaling pathways, such as that of the Src tyrosine kinase.

[0074] Those having skill in the pertinent art will appreciate that protein tyrosine kinase pathways, e.g., the Src tyrosine kinase pathway, are present and functional in cell types other than cell lines of lung tissue. Therefore, the described predictor set of polynucleotides, or combinations of polynucleotides within the predictor set, can show utility for predicting drug sensitivity or resistance to compounds that interact with, or inhibit, a protein tyrosine kinase activity in cells from other tissues or organs associated with a disease state, or cancers or tumors derived from other tissue or organ types. Non-limiting examples of such cells, tissues and organs include colon, breast, lung, heart, prostate, testes, ovaries, cervix, esophagus, pancreas, spleen, liver, kidney, intestine, stomach, lymphocytic and brain, thereby providing a broad and advantageous applicability to the predictor polynucleotide sets described herein. Cells for analysis can be obtained by conventional procedures as known in the art, for example, tissue or organ biopsy, aspiration, sloughed cells, e.g., colonocytes, clinical or medical tissue, or cell sampling procedures.

[0075] The use of a predictor, or predictor set, (e.g., predictor polynucleotides, or a predictor set of polynucleotides) allows for the prediction of an outcome prior to having any knowledge about a biological system. Essentially, a predictor can be considered to be a tool that is useful in predicting the phenotype that is used to classify the biological system. In the specific embodiment provided by the present invention, the classification as “resistant” or “sensitive” is based on the IC₅₀ value of each cell line to a compound (e.g., the protein tyrosine kinase inhibitor compound BMS-A as exemplified herein), relative to the mean IC₅₀) value of the cell line panel (e.g., a twenty-three lung cell line panel, as exemplified herein).

[0076] Although the complete function of all of the polynucleotides and their functional products (proteins and mRNAs) that make up a predictor set are not currently known, some of the polynucleotides are likely to be directly or indirectly involved in a protein tyrosine kinase signaling pathway, such as the Src tyrosine kinase signaling pathway. In addition, some of the polynucleotides in the predictor set may function in the metabolic or other resistance pathways specific to the compounds being tested. Notwithstanding, a knowledge about the function of the polynucleotides is not a requisite for determining the accuracy of a predictor according to the practice of the present invention.

[0077] As described herein, polynucleotides have been discovered that correlate to the relative intrinsic sensitivity or resistance of lung cell lines to treatment with compounds that interact with and inhibit protein tyrosine kinases, e.g., Src tyrosine kinase. These polynucleotides have been shown, through a weighted voting, leave-one-out, cross validation program, to have utility in predicting the intrinsic resistance and sensitivity of lung cell lines to these compounds.

[0078] An embodiment of the present invention relates to a method of determining or predicting if an individual requiring drug or chemotherapeutic treatment or therapy for a disease, for example, a lung cancer or a lung tumor, will be likely to successfully respond or not respond to the drug or chemotherapeutic agent prior to subjecting the individual to such treatment or chemotherapy. The drug or chemotherapeutic agent can be one that modulates a protein tyrosine kinase activity or signaling involving a protein tyrosine kinase. Nonlimiting examples of such protein tyrosine kinases include members of the Src family of tyrosine kinases, for example, Src, Fgr, Fyn, Yes, Blk, Hck, Lck and Lyn, as well as other protein tyrosine kinases, including, Bcr-abl, Jak, PDGFR, c-kit and Eph receptors. In accordance with the method of the invention, cells from a tissue or organ associated with disease, e.g., a patient biopsy of a tumor or cancer, preferably a lung cancer or tumor biopsy, are subjected to an in vitro assay as described herein, to determine their marker polynucleotide expression pattern (polynucleotides from Table 2 and/or the predictor polynucleotide subsets of Tables 4-5) prior to their treatment with the compound or drug, preferably an inhibitor of a protein tyrosine kinase. The resulting polynucleotide expression profile of the cells before drug treatment is compared with the polynucleotide expression pattern of the same polynucleotides in cells that are either resistant or sensitive to the drug or compound, as provided by the present invention.

[0079] In another related embodiment, the present invention includes a method of predicting, prognosing, diagnosing, and/or determining whether an individual requiring drug therapy for a disease state or chemotherapeutic for cancer (e.g., lung cancer) will or will not respond to treatment prior to administration of treatment. The treatment or therapy preferably involves a protein tyrosine kinase modulating agent, compound, or drug, for example, an inhibitor of the protein tyrosine kinase activity. Protein tyrosine kinases include, without limitation, members of the Src family of tyrosine kinases, for example, Src, Fgr, Fyn, Yes, Blk, Hck, Lck and Lyn, as well as other protein tyrosine kinases, including, Bcr-abl, Jak, PDGFR, c-kit and Eph receptors. Preferred is src tyrosine kinase and inhibitors thereof. In accordance with this embodiment, cells from a patient's tissue sample, e.g., a lung tumor or cancer biopsy, are assayed to determine their polynucleotide expression pattern prior to treatment with the protein tyrosine kinase modulating agent, compound, or drug. The resulting polynucleotide expression profile of the test cells before exposure to the compound or drug is compared with that of one or more of the predictor subsets of polynucleotides comprising either 15 or 40 polynucleotides as described herein and shown in Tables 4-5, respectively.

[0080] Success or failure of treatment of a patient's cancer or tumor with the drug can be determined based on the polynucleotide expression pattern of the patient's cells being tested, compared with the polynucleotide expression pattern of the predictor polynucleotides in the resistant or sensitive panel of that have been exposed to the drug or compound and subjected to the predictor polynucleotide analysis detailed herein. Thus, if following exposure to the drug, the test cells show a polynucleotide expression pattern corresponding to that of the predictor polynucleotide set of the control panel of cells that is sensitive to the drug or compound, it is highly likely or predicted that the individual's cancer or tumor will respond favorably to treatment with the drug or compound. By contrast, if, after drug exposure, the test cells show a polynucleotide expression pattern corresponding to that of the predictor polynucleotide set of the control panel of cells that is resistant to the drug or compound, it is highly likely or predicted that the individual's cancer or tumor will not respond to treatment with the drug or compound.

[0081] In a related embodiment, screening assays are provided for determining if a patient's cancer or tumor is or will be susceptible or resistant to treatment with a drug or compound, particularly, a drug or compound directly or indirectly involved in protein tyrosine kinase activity or a protein tyrosine kinase pathway, e.g., the Src tyrosine kinase activity or pathway.

[0082] Also provided by the present invention are monitoring assays to monitor the progress of a drug treatment involving drugs or compounds that interact with or inhibit protein tyrosine kinase activity. Protein tyrosine kinases encompassed by these monitoring assays include members of the Src family of tyrosine kinases, for example, Src, Fgr, Fyn, Yes, Blk, Hck, Lck and Lyn, as well as other protein tyrosine kinases, including, Bcr-abl, Jak, PDGFR, c-kit and Eph receptors. Such in vitro assays are capable of monitoring the treatment of a patient having a disease treatable by a compound or agent that modulates or interacts with a protein tyrosine kinase by comparing the resistance or sensitivity polynucleotide expression pattern of cells from a patient tissue sample, e.g., a tumor or cancer biopsy, preferably a lung cancer or tumor sample, prior to treatment with a drug or compound that inhibits the protein tyrosine kinase activity and again following treatment with the drug or compound with the expression pattern of one or more of the predictor polynucleotide sets described, or combinations thereof. Isolated cells from the patient are assayed to determine their polynucleotide expression pattern before and after exposure to a compound or drug, preferably a protein tyrosine kinase inhibitor, to determine if a change of the polynucleotide expression profile has occurred so as to warrant treatment with another drug or agent, or discontinuing current treatment. The resulting polynucleotide expression profile of the cells tested before and after treatment is compared with the polynucleotide expression pattern of the predictor set of polynucleotides that have been described and shown herein to be highly expressed in cells that are either resistant or sensitive to the drug or compound. Alternatively, a patient's progress related to drug treatment or therapy can be monitored by obtaining a polynucleotide expression profile as described above, only after the patient has undergone treatment with a given drug or therapeutic compound. In this way, there is no need to test a patient sample prior to treatment with the drug or compound.

[0083] Such a monitoring process can indicate success or failure of a patient's treatment with a drug or compound based on the polynucleotide expression pattern of the cells isolated from the patient's sample, e.g., a tumor or cancer biopsy, as being relatively the same as or different from the polynucleotide expression pattern of the predictor polynucleotide set of the resistant or sensitive control panel of cells that have been exposed to the drug or compound and assessed for their polynucleotide expression profile following exposure. Thus, if, after treatment with a drug or compound, the test cells show a change in their polynucleotide expression profile from that seen prior to treatment to one which corresponds to that of the predictor polynucleotide set of the control panel of cells that are resistant to the drug or compound, it can serve as an indicator that the current treatment should be modified, changed, or even discontinued. Also, should a patient's response be one that shows sensitivity to treatment by a protein tyrosine kinase inhibitor compound, e.g., a Src tyrosine kinase inhibitor, based on correlation of the expression profile of the predictor polynucleotides of cells showing drug sensitivity with the polynucleotide expression profile from cells from a patient undergoing treatment, the patient's treatment prognosis can be qualified as favorable and treatment can continue. Further, if a patient has not been tested prior to drug treatment, the results obtained after treatment can be used to determine the resistance or sensitivity of the cells to the drug based on the polynucleotide expression profile compared with the predictor polynucleotide set.

[0084] In a related embodiment, the present invention embraces a method of monitoring the treatment of a patient having a disease treatable by a compound or agent that modulates a protein tyrosine kinase, i.e., lung cancer. Protein tyrosine kinases encompassed by such treatment monitoring assays include members of the Src family of tyrosine kinases, for example, Src, Fgr, Fyn, Yes, Blk, Hck, Lck and Lyn, as well as other protein tyrosine kinases, including, Bcr-abl, Jak, PDGFR, c-kit and Eph receptors. For these assays, test cells from the patient are assayed to determine their polynucleotide expression pattern before and after exposure to a protein tyrosine kinase inhibitor compound or drug. The resulting polynucleotide expression profile of the cells tested before and after treatment is compared with the polynucleotide expression pattern of the predictor set of polynucleotides that have been described and shown herein to be highly expressed in cells that are either resistant or sensitive to the drug or compound. Thus, if a patient's response is or becomes one that is sensitive to treatment by a protein tyrosine kinase inhibitor compound, based on correlation of the expression profile of the predictor polynucleotides, the patient's treatment prognosis can be qualified as favorable and treatment can continue. Also, if after treatment with a drug or compound, the test cells do not exhibit a change in their polynucleotide expression profile to a profile that corresponds to that of the control panel of cells that are sensitive to the drug or compound, this serves as an indicator that the current treatment should be modified, changed, or even discontinued. Such monitoring processes can be repeated as necessary or desired and can indicate success or failure of a patient's treatment with a drug or compound, based on the polynucleotide expression pattern of the cells isolated from the patient's sample. The monitoring of a patient's response to a given drug treatment can also involve testing the patient's cells in the assay as described, only after treatment, rather than before and after treatment, with drug or active compound.

[0085] In a preferred embodiment, the present invention embraces a method of monitoring the treatment of a patient having a disease treatable by a compound or agent that modulates a src tyrosine kinase, i.e., lung cancer. The test cells from the patient are assayed to determine their polynucleotide expression pattern before and after exposure to a src tyrosine kinase inhibitor compound or drug. The resulting polynucleotide expression profile of the cells tested before and after treatment is compared with the polynucleotide expression pattern of the predictor set of polynucleotides that have been described and shown herein to be highly expressed in cells that are either resistant or sensitive to the drug or compound. Thus, if a patient's response is or becomes one that is sensitive to treatment by a src tyrosine kinase inhibitor compound, based on correlation of the expression profile of the predictor polynucleotides, the patient's treatment prognosis can be qualified as favorable and treatment can continue. Also, if after treatment with a drug or compound, the test cells do not exhibit a change in their polynucleotide expression profile to a profile that corresponds to that of the control panel of cells that are sensitive to the drug or compound, this serves as an indicator that the current treatment should be modified, changed, or even discontinued. Such monitoring processes can be repeated as necessary or desired and can indicate success or failure of a patient's treatment with a drug or compound, based on the polynucleotide expression pattern of the cells isolated from the patient's sample. The monitoring of a patient's response to a given drug treatment can also involve testing the patient's cells in the assay as described only after treatment, rather than before and after treatment, with drug or active compound.

[0086] In another embodiment, the present invention encompasses a method of classifying whether a biological system, preferably cells from a tissue, organ, tumor or cancer of an afflicted individual, will be resistant or sensitive to a compound that modulates the system. In a preferred aspect of this invention, the sensitivity or resistance of cells, e.g., those obtained from a tumor or cancer, to a protein tyrosine kinase inhibitor compound, or series of compounds, e.g., a Src tyrosine kinase inhibitor, is determined. Inhibitors can include those compounds, drugs, or biological agents that inhibit, either directly or indirectly, the protein tyrosine kinases as described previously hereinabove. According to the method, a resistance/sensitivity profile of the cells after exposure to the protein tyrosine kinase inhibitor drug or compound can be determined via polynucleotide expression profiling protocols set forth herein. Such resistance/sensitivity profile of the cells reflects an IC₅₀ value of the cells to the compound(s) as determined using a suitable assay, such as an in vitro cytotoxicity assay as described in Example 1. A procedure of this sort can be performed using a variety of cell types and compounds that interact with the protein tyrosine kinase, or affect its activity in the signaling pathway of the protein tyrosine kinase.

[0087] In another of its embodiments, the present invention includes the preparation of one or more specialized microarrays (e.g., oligonucleotide microarrays or cDNA microarrays) comprising all of the polynucleotides in Tables 2, 4, or 5, or combinations thereof, of the predictor polynucleotide sets described herein that have been demonstrated to be most highly correlated with sensitivity (or resistance) to protein tyrosine kinase modulators, particularly inhibitors of src tyrosine kinase. Preferably, the predictor polynucleotide sets are common for predicting sensitivity among more than one protein tyrosine kinase modulator, e.g. a protein tyrosine kinase inhibitor such as a Src tyrosine kinase inhibitor, as demonstrated herein. In accordance with this aspect of the invention, the oligonucleotide sequences or cDNA sequences include any of the predictor polynucleotides or polynucleotide combinations as described herein, which are highly expressed in resistant or sensitive cells, and are contained on a microarray, e.g., a oligonucleotide microarray or cDNA microarray in association with, or introduced onto, any supporting material, such as glass slides, nylon membrane filters, glass or polymer beads, chips, plates, or other types of suitable substrate material.

[0088] Cellular nucleic acid, e.g., RNA, is isolated either from cells undergoing testing after exposure to a drug or compound that interacts with a protein tyrosine kinase as described herein, or its signaling pathway, or from cells being tested to obtain an initial determination or prediction of the cells' sensitivity to the drug or compound, and, ultimately, a prediction of treatment outcome with the drug or compound. The isolated nucleic acid is appropriately labeled and applied to one or more of the specialized microarrays. The resulting pattern of polynucleotide expression on the specialized microarray is analyzed as described herein and known in the art. A pattern of polynucleotide expression correlating with either sensitivity or resistance to the drug or compound is able to be determined, e.g., via comparison with the polynucleotide expression pattern as shown in FIG. 1 for the panel of cells exposed to the protein tyrosine kinase inhibitor assayed herein.

[0089] In accordance with the specialized microarray embodiment of this invention, the microarray contains the polynucleotides of one or more of the predictor polynucleotide set(s) or subset(s), or a combination thereof, or all of the polynucleotides in Tables 2, 4, or 5, that are highly correlated with drug sensitivity or resistance by a lung cell type. If the nucleic acid target isolated from test cells, such as tumor or cancer cells, preferably lung cancer or tumor cells, shows a high level of detectable binding to the polynucleotides of the predictor set for drug sensitivity relative to control, then it can be predicted that a patient's cells will respond to the drug, or a series of drugs, and that the patient's response to the drug, or a series of drugs, will be favorable.

[0090] Such a result predicts that the cells of a tumor or cancer are good candidates for the successful treatment or therapy utilizing the drug, or series of drugs. Alternatively, if the nucleic acid target isolated from test cells shows a high level of detectable binding to the polynucleotides of the predictor set for drug resistance, relative to control, then it can be predicted that a patient is likely not to respond to the drug, or a series of drugs, and that the patient's response to the drug, or a series of drugs, is not likely to be favorable. Such a result predicts that the cells of a tumor or cancer are not good candidates for treatment or therapy utilizing the drug, or series of drugs.

[0091] The utilization of microarray technology is known and practiced in the art. Briefly, to determine polynucleotide expression using microarray technology, polynucleotides, e.g., RNA, DNA, cDNA, preferably RNA, are isolated from a biological sample, e.g., cells, as described herein for lung cells, using procedures and techniques that are practiced in the art. The isolated nucleic acid is detectably labeled, e.g., fluorescent, enzyme, radionuclide, or chemiluminescent label, and applied to a microarray, e.g., the specialized microarrays provided by this invention. The array is then washed to remove unbound material and visualized by staining or fluorescence, or other means known in the art depending on the type of label utilized.

[0092] In another embodiment of this invention, the predictor polynucleotides (Table 2), or one or more subsets of polynucleotides comprising the predictor polynucleotide sets (e.g., Tables 4-5) can be used as biomarkers for cells that are resistant or sensitive to protein tyrosine kinase inhibitor compounds, e.g., Src tyrosine kinase inhibitors. With the predictor polynucleotides in hand, screening and detection assays can be carried out to determine whether or not a given compound, preferably a protein tyrosine kinase inhibitor compound such as a Src tyrosine kinase inhibitor compound, elicits a sensitive or a resistant phenotype following exposure of cells, e.g., cells taken from a tumor or cancer biopsy sample, such as a lung cancer cell sample, to the compound. Thus, methods of screening, monitoring, detecting, prognosing and/or diagnosing to determine the resistance or sensitivity of cells to a drug or compound that interacts with a protein tyrosine kinase, or a protein tyrosine kinase pathway, preferably an inhibitor compound, and to which the cells are exposed, are encompassed by the present invention.

[0093] Such methods embrace a variety of procedures and assays to determine and assess the expression of polynucleotides, in particular, the predictor or src biomarker polynucleotides and predictor polynucleotide subsets as described herein (Tables 2, 4, and 5), in cells that have been exposed to drugs or compounds that interact with or effect a protein tyrosine kinase, or a protein tyrosine kinase pathway, wherein the protein tyrosine kinases include members of the Src family of tyrosine kinases, for example, Src, Fgr, Fyn, Yes, Blk, Hck, Lck and Lyn, as well as other protein tyrosine kinases, including, Bcr-abl, Jak, PDGFR, c-kit and Eph receptors. Suitable methods include detection and evaluation of polynucleotide activation or expression at the level of nucleic acid, e.g., DNA, RNA, mRNA, and detection and evaluation of encoded protein. For example, PCR assays as known and practiced in the art can be employed to quantify RNA or DNA in cells being assayed for susceptibility to drug treatment, for example, protein tyrosine kinase inhibitors. (see Example 2, RT-PCR).

[0094] In another embodiment, the present invention is directed to a method of identifying cells, tissues, and/or patients that are predicted to be resistant to either protein tyrosine inhibitor compounds or compounds that affect protein tyrosine kinase signaling pathways, e.g., Src tyrosine kinase, or that are resistant in different biological systems to those compounds. The method comprises the step(s) of (i) analyzing the expression of only those polynucleotides listed in Tables 2, 4, 5, or any combination thereof, that have been shown to be correlative to predicting resistant responses to such compounds; (ii) comparing the observed expression levels of those correlative resistant polynucleotides in the test cells, tissues, and/or patients to the expression levels of those same polynucleotides in a cell line that is known to be resistant to the compounds; and (iii) predicting whether the cells, tissues, and/or patients are resistant to the compounds based upon the overall similarity of the observed expression of those polynucleotides in step (ii).

[0095] In another embodiment, the present invention is directed to a method of identifying cells, tissues, and/or patients that are predicted to be sensitive to either protein tyrosine inhibitor compounds or compounds that affect protein tyrosine kinase signaling pathways, e.g., the Src tyrosine kinase, or that are sensitive in different biological systems to those compounds. The method involves the step(s) of (i) analyzing the expression of only those polynucleotides listed in Tables 2, 4, 5, or any combination thereof, that have been shown to be correlative to predicting sensitive responses to such compounds; (ii) comparing the observed expression levels of those correlative sensitive polynucleotides in the test cells, tissues, and/or patients to the expression levels of those same polynucleotides in a cell line that is known to be sensitive to the compounds; and (iii) predicting whether the cells, tissues, and/or patients are sensitive to the compounds based upon the overall similarity of the observed expression of those polynucleotides in step (ii).

[0096] The present invention further encompasses the detection and/or quantification of one or more of the protein tyrosine kinase biomarker proteins of the present invention using antibody-based assays (e.g., immunoassays) and/or detection systems. As mentioned, protein tyrosine kinases encompass members of the Src family of tyrosine kinases, for example, Src, Fgr, Fyn, Yes, Blk, Hck, Lck and Lyn, as well as other protein tyrosine kinases, including, Bcr-abl, Jak, PDGFR, c-kit and Eph receptors. Such assays include the following non-limiting examples, ELISA, immunofluorescence, fluorescence activated cell sorting (FACS), Western Blots, etc., as further described herein.

[0097] In another embodiment, the human protein tyrosine kinase biomarker polypeptides and/or peptides of the present invention, or immunogenic fragments or oligopeptides thereof, can be used for screening therapeutic drugs or compounds in a variety of drug screening techniques. The fragment employed in such a screening assay can be free in solution, affixed to a solid support, borne on a cell surface, or located intracellularly. The reduction or abolition of activity of the formation of binding complexes between the biomarker protein and the agent being tested can be measured. Thus, the present invention provides a method for screening or assessing a plurality of compounds for their specific binding affinity with a protein kinase inhibitor biomarker polypeptide, or a bindable peptide fragment thereof, of this invention. The method comprises the steps of providing a plurality of compounds; combining the protein kinase inhibitor biomarker polypeptide, or a bindable peptide fragment thereof, with each of the plurality of compounds, for a time sufficient to allow binding under suitable conditions; and detecting binding of the biomarker polypeptide or peptide to each of the plurality of test compounds, thereby identifying the compounds that specifically bind to the biomarker polypeptide or peptide. More specifically, the biomarker polypeptide or peptide is that of a Src tyrosine kinase inhibitor biomarkers.

[0098] Methods to identify compounds that modulate the activity of the human protein tyrosine kinase biomarker polypeptides and/or peptides provided in Table 2 by the present invention, comprise combining a candidate compound or drug modulator of protein kinases and measuring an effect of the candidate compound or drug modulator on the biological activity of the protein kinase inhibitor biomarker polypeptide or peptide. Such measurable effects include, for example, a physical binding interaction; the ability to cleave a suitable protein kinase substrate; effects on a native and cloned protein kinase biomarker-expressing cell line; and effects of modulators or other protein kinase-mediated physiological measures.

[0099] Another method of identifying compounds that modulate the biological activity of the protein tyrosine kinase biomarker polypeptides of the present invention comprises combining a potential or candidate compound or drug modulator of a protein tyrosine kinase biological activity, e.g., a Src tyrosine kinase, with a host cell that expresses the protein tyrosine kinase biomarker polypeptide and measuring an effect of the candidate compound or drug modulator on the biological activity of the protein tyrosine kinase biomarker polypeptides. The host cell can also be capable of being induced to express the protein tyrosine kinase biomarker polypeptide, e.g., via inducible expression. Physiological effects of a given modulator candidate on the protein tyrosine kinase biomarker polypeptide can also be measured. Thus, cellular assays for particular protein tyrosine kinase modulators, e.g., a src kinase modulator, can be either direct measurement or quantification of the physical biological activity of the protein tyrosine kinase biomarker polypeptide, or they may be measurement or quantification of a physiological effect. Such methods preferably employ a protein tyrosine kinase biomarker polypeptide as described herein, or an overexpressed recombinant protein tyrosine kinase biomarker polypeptide in suitable host cells containing an expression vector as described herein, wherein the protein tyrosine kinase biomarker polypeptide is expressed, overexpressed, or undergoes up-regulated expression.

[0100] Another aspect of the present invention embraces a method of screening for a compound that is capable of modulating the biological activity of a protein tyrosine kinase biomarker polypeptide, e.g., a Src kinase biomarker polypeptide. The method comprises providing a host cell containing an expression vector harboring a nucleic acid sequence encoding a protein tyrosine kinase biomarker polypeptide, or a functional peptide or portion thereof (e.g., the src polypeptide, protein, peptide, or fragment sequences as set forth in Table 2, or the Sequence Listing herein); determining the biological activity of the expressed protein tyrosine kinase biomarker polypeptide in the absence of a modulator compound; contacting the cell with the modulator compound and determining the biological activity of the expressed protein tyrosine kinase biomarker polypeptide in the presence of the modulator compound. In such a method, a difference between the activity of the protein tyrosine kinase biomarker polypeptide in the presence of the modulator compound and in the absence of the modulator compound indicates a modulating effect of the compound.

[0101] Essentially any chemical compound can be employed as a potential modulator or ligand in the assays according to the present invention. Compounds tested as protein tyrosine kinase modulators can be any small chemical compound, or biological entity (e.g., protein, sugar, nucleic acid, or lipid). Test compounds are typically small chemical molecules and peptides. Generally, the compounds used as potential modulators can be dissolved in aqueous or organic (e.g., DMSO-based) solutions. The assays are designed to screen large chemical libraries by automating the assay steps and providing compounds from any convenient source. Assays are typically run in parallel, for example, in microtiter formats on microtiter plates in robotic assays. There are many suppliers of chemical compounds, including, for example, Sigma (St. Louis, Mo.), Aldrich (St. Louis, Mo.), Sigma-Aldrich (St. Louis, Mo.), Fluka Chemika-Biochemica Analytika (Buchs, Switzerland). Also, compounds can be synthesized by methods known in the art.

[0102] High throughput screening methodologies are particularly envisioned for the detection of modulators of the novel protein tyrosine kinase biomarker, e.g., src biomarker, polynucleotides and polypeptides described herein. Such high throughput screening methods typically involve providing a combinatorial chemical or peptide library containing a large number of potential therapeutic compounds (e.g., ligand or modulator compounds). The combinatorial chemical libraries or ligand libraries are then screened in one or more assays to identify those library members (e.g., particular chemical species or subclasses) that display a desired characteristic activity. The compounds so identified can serve as conventional lead compounds, or can themselves be used as potential or actual therapeutics.

[0103] A combinatorial chemical library is a collection of diverse chemical compounds generated either by chemical synthesis or biological synthesis, prepared by combining a number of chemical building blocks (i.e., reagents such as amino acids). As an example, a linear combinatorial library, e.g., a polypeptide or peptide library, is formed by combining a set of chemical building blocks in every possible way for a given compound length (i.e., the number of amino acids in a polypeptide or peptide compound). Millions of chemical compounds can be synthesized through such combinatorial mixing of chemical building blocks.

[0104] The preparation and screening of combinatorial chemical libraries is well known to those having skill in the pertinent art. Combinatorial libraries include, without limitation, peptide libraries (e.g. U.S. Pat. No. 5,010,175; Furka, 1991, Int. J. Pept. Prot. Res., 37:487-493; and Houghton et al., 1991, Nature, 354:84-88). Other chemistries for generating chemical diversity libraries can also be used. Nonlimiting examples of chemical diversity library chemistries include, peptoids (PCT Publication No. WO 91/019735), encoded peptides (PCT Publication No. WO 93/20242), random bio-oligomers (PCT Publication No. WO 92/00091), benzodiazepines (U.S. Pat. No. 5,288,514), diversomers such as hydantoins, benzodiazepines and dipeptides (Hobbs et al., 1993, Proc. Natl. Acad. Sci. USA, 90:6909-6913), vinylogous polypeptides (Hagihara et al., 1992, J. Amer. Chem. Soc., 114:6568), nonpeptidal peptidomimetics with glucose scaffolding (Hirschmann et al., 1992, J. Amer. Chem. Soc., 114:9217-9218), analogous organic synthesis of small compound libraries (Chen et al., 1994, J. Amer. Chem. Soc., 116:2661), oligocarbamates (Cho et al., 1993, Science, 261:1303), and/or peptidyl phosphonates (Campbell et al., 1994, J. Org. Chem., 59:658), nucleic acid libraries (see Ausubel, Berger and Sambrook, all supra), peptide nucleic acid libraries (U.S. Pat. No. 5,539,083), antibody libraries (e.g., Vaughn et al., 1996, Nature Biotechnology, 14(3):309-314) and PCT/US96/10287), carbohydrate libraries (e.g., Liang et al., 1996, Science, 274-1520-1522) and U.S. Pat. No. 5,593,853), small organic molecule libraries (e.g., benzodiazepines, Baum C&EN, Jan. 18, 1993, page 33; and U.S. Pat. No. 5,288,514; isoprenoids (U.S. Pat. No. 5,569,588); thiazolidinones and metathiazanones (U.S. Pat. No. 5,549,974); pyrrolidines (U.S. Pat. Nos. 5,525,735 and 5,519,134); morpholino compounds (U.S. Pat. No. 5,506,337); and the like.

[0105] Devices for the preparation of combinatorial libraries are commercially available (e.g., 357 MPS, 390 MPS, Advanced Chem Tech, Louisville Ky.; Symphony, Rainin, Woburn, Mass.; 433A Applied Biosystems, Foster City, Calif.; 9050 Plus, Millipore, Bedford, Mass.). In addition, a large number of combinatorial libraries are commercially available (e.g., ComGenex, Princeton, N.J.; Asinex, Moscow, Russia; Tripos, Inc., St. Louis, Mo.; ChemStar, Ltd., Moscow, Russia; 3D Pharmaceuticals, Exton, Pa.; Martek Biosciences, Columbia, Md., and the like).

[0106] In one aspect, the invention provides solid phase-based in vitro assays in a high throughput format, where the cell or tissue expressing a tyrosine kinase protein/polypeptide/peptide is attached to a solid phase substrate. In another aspect, the invention provides suspension phase-based in vitro assays in a high throughput format, where the cell or tissue expressing a tyrosine kinase protein/polypeptide/peptide are non-adherent and in suspension. In such high throughput assays, it is possible to screen up to several thousand different modulators or ligands in a single day. In particular, each well of a microtiter plate can be used to perform a separate assay against a selected potential modulator, or, if concentration or incubation time effects are to be observed, every 5-10 wells can be used to test a single modulator. Thus, a single standard microtiter plate can be used in to assay about 96 modulators. If 1536 well plates are used, then a single plate can easily assay from about 100 to about 1500 different compounds. It is possible to assay several different plates per day; thus, for example, assay screens for up to about 6,000-20,000 different compounds are possible using the described integrated systems.

[0107] In another of its aspects, the present invention encompasses screening and small molecule (e.g., drug) detection assays which involve the detection or identification of small molecules that can bind to a given protein, i.e., a tyrosine kinase biomarker polypeptide or peptide, such as a Src tyrosine kinase biomarker polypeptide or peptide. Particularly preferred are assays suitable for high throughput screening methodologies.

[0108] In such binding-based detection, identification, or screening assays, a functional assay is not typically required. All that is needed, in general, is a target protein, preferably substantially purified, and a library or panel of compounds (e.g., ligands, drugs, or small molecules), or biological entities to be screened or assayed for binding to the protein target. Preferably, most small molecules that bind to the target protein modulate the target's activity in some manner due to preferential, higher affinity binding to functional areas or sites on the protein.

[0109] An example of such an assay is the fluorescence based thermal shift assay (3-Dimensional Pharmaceuticals, Inc., 3DP, Exton, Pa.) as described in U.S. Pat. Nos. 6,020,141 and 6,036,920 to Pantoliano et al. (See also, J. Zimmerman, 2000, Gen. Eng. News, 20(8)). The assay allows the detection of small molecules (e.g., drugs, ligands) that bind to expressed, and preferably purified, tyrosine kinase biomarker proteins/polypeptides/peptides, such as the Src tyrosine kinase, based on affinity of binding determinations by analyzing thermal unfolding curves of protein-drug or ligand complexes. The drugs or binding molecules determined by this technique can be further assayed, if desired, by methods such as those described herein to determine if the molecules affect or modulate function or activity of the target protein.

[0110] To purify a tyrosine kinase biomarker polypeptide or peptide, e.g., Src tyrosine kinase, to measure a biological binding or ligand binding activity, the source may be a whole cell lysate that can be prepared by successive freeze-thaw cycles (e.g., one to three) in the presence of standard protease inhibitors. The tyrosine kinase biomarker polypeptide can be partially or completely purified by standard protein purification methods, e.g., affinity chromatography using specific antibody(ies) described herein, or by ligands specific for an epitope tag engineered into the recombinant tyrosine kinase biomarker polypeptide molecule, also as described herein. Binding activity can then be measured as described.

[0111] Compounds which are identified according to the methods provided herein, and which modulate or regulate the biological activity or physiology of the tyrosine kinase biomarker polypeptides according to the present invention, are a preferred embodiment of this invention. It is contemplated that such modulatory compounds can be employed in treatment and therapeutic methods for treating a condition that is mediated by the tyrosine kinase biomarker polypeptides, e.g., Src tyrosine kinase biomarker polypeptides, by administering to an individual in need of such treatment a therapeutically effective amount of the compound identified by the methods described herein.

[0112] In addition, the present invention provides methods for treating an individual in need of such treatment for a disease, disorder, or condition that is mediated by the tyrosine kinase biomarker polypeptides of the invention, comprising administering to the individual a therapeutically effective amount of the tyrosine kinase biomarker-modulating compound identified by a method provided herein. In accordance with this invention, the tyrosine kinase biomarker polypeptides or proteins encompassed by the methods include members of the Src family of tyrosine kinases, for example, Src, Fgr, Fyn, Yes, Blk, Hck, Lck and Lyn, as well as other protein tyrosine kinases, including, Bcr-abl, Jak, PDGFR, c-kit and Eph receptors.

[0113] The present invention particularly provides methods for treating an individual in need of such treatment for a disease, disorder, or condition that is mediated by Src biomarker polypeptides of the invention, comprising administering to the individual a therapeutically effective amount of the Src biomarker-modulating compound identified by a method provided herein.

[0114] The present invention further encompasses polypeptides comprising, or alternatively consisting of, an epitope of the polypeptide having an amino acid sequence of one or more of the protein tyrosine kinase biomarkers, preferably the Src biomarker amino acid sequences as set forth in Table 2. The present invention also encompasses polynucleotide sequences encoding an epitope of a polypeptide sequence of the protein tyrosine kinase biomarkers of the invention.

[0115] The term “epitopes” as used herein, refers to portions of a polypeptide having antigenic or immunogenic activity in an animal, preferably a mammal, and most preferably a human. In a preferred embodiment, the present invention encompasses a polypeptide comprising an epitope, as well as the polynucleotide encoding this polypeptide. An “immunogenic epitope” as used herein, refers to a portion of a protein that elicits an antibody response in an animal, as determined by any method known in the art, for example, by the methods for generating antibodies described infra. (See, for example, Geysen et al., 1983, Proc. Natl. Acad. Sci. USA, 81:3998-4002). The term “antigenic epitope” as used herein refers to a portion of a protein to which an antibody can immunospecifically bind to its antigen as determined by any method well known in the art, for example, by the immunoassays described herein. Immunospecific binding excludes non-specific binding, but does not necessarily exclude cross-reactivity with other antigens. Antigenic epitopes need not necessarily be immunogenic. Either the full-length protein or an antigenic peptide fragment can be used. Antibodies are preferably prepared from these regions or from discrete fragments in regions of the tyrosine kinase biomarker nucleic acid and protein sequences comprising an epitope. Polypeptide or peptide fragments that function as epitopes may be produced by any conventional means. (See, e.g., Houghten, 1985, Proc. Natl. Acad. Sci. USA, 82:5131-5135; and as described in U.S. Pat. No. 4,631,211).

[0116] Moreover, antibodies can also be prepared from any region of the polypeptides and peptides of the protein tyrosine kinase biomarkers, including Src kinase biomarkers as described herein. In addition, if a polypeptide is a receptor protein, antibodies can be developed against an entire receptor or portions of the receptor, for example, the intracellular carboxy terminal domain, the amino terminal extracellular domain, the entire transmembrane domain, specific transmembrane segments, any of the intracellular or extracellular loops, or any portions of these regions. Antibodies can also be developed against specific functional sites, such as the site of ligand binding, or sites that are glycosylated, phosphorylated, myristylated, or amidated, for example.

[0117] In the present invention, antigenic epitopes for generating antibodies preferably contain a sequence of at least 4, at least 5, at least 6, at least 7, more preferably at least 8, at least 9, at least 10, at least 11, at least 12, at least 13, at least 14, at least 15, at least 20, at least 25, at least 30, at least 40, at least 50, and, most preferably, between about 15 to about 30 amino acid residues. Combinations of the foregoing epitopes are included. Preferred polypeptides comprising immunogenic or antigenic epitopes are at least 10, 15, 20, 25, 30, 35, 40, 45, 50, 55, 60, 65, 70, 75, 80, 85, 90, 95, or 100 amino acid residues in length. Additional non-exclusive preferred antigenic epitopes include the antigenic epitopes disclosed herein, as well as portions thereof, as well as any combination of two, three, four, five or more of these antigenic epitopes. Such antigenic epitopes can be used as the target molecules in immunoassays. (See, for instance, Wilson et al., 1984, Cell, 37:767-778; and Sutcliffe et al., 1983, Science, 219:660-666). The fragments as described herein are not to be construed, however, as encompassing any fragments which may be disclosed prior to the invention.

[0118] Protein tyrosine kinase biomarker polypeptides comprising one or more immunogenic epitopes which elicit an antibody response can be introduced together with a carrier protein, such as an albumin, to an animal system (such as rabbit or mouse). Alternatively, if the polypeptide is of sufficient length (e.g., at least about 15-25 amino acids), the polypeptide can be presented without a carrier. However, immunogenic epitopes comprising as few as 5 to 10 amino acids have been shown to be sufficient to raise antibodies capable of binding to, at the very least, linear epitopes in a denatured polypeptide (e.g., in Western blotting).

[0119] Epitope-bearing polypeptides of the present invention can be used to induce antibodies according to methods well known in the art including, but not limited to, in vivo immunization, in vitro immunization, and phage display methods. See, e.g., Sutcliffe et al., supra; Wilson et al., supra; and Bittle et al., supra). If in vivo immunization is used, animals can be immunized with free peptide of appropriate size; however, the anti-peptide antibody titer can be boosted by coupling the peptide to a macromolecular carrier, such as keyhole limpet hemacyanin (KLH), or tetanus toxoid (TT). For instance, peptides containing cysteine residues can be coupled to a carrier using a linker such as maleimidobenzoyl-N-hydroxysuccinimide ester (MBS), while other peptides may be coupled to carriers using a more general linking agent, such as glutaraldehyde.

[0120] Peptides containing epitopes can also be synthesized as multiple antigen peptides (MAPs), first described by J. P. Tam et al. (1995, Biomed. Pept., Proteins, Nucleic Acids, 199, 1(3):123-32) and Calvo et al. (1993, J. Immunol., 150(4):1403-12), which are hereby incorporated by reference in their entirety herein. MAPs contain multiple copies of a specific peptide attached to a non-immunogenic lysine core. MAP peptides usually contain four or eight copies of the peptide, which are often referred to as MAP4 or MAP8 peptides. By way of non-limiting example, MAPs can be synthesized onto a lysine core matrix attached to a polyethylene glycol-polystyrene (PEG-PS) support. The peptide of interest is synthesized onto the lysine residues using 9-fluorenylmethoxycarbonyl (Fmoc) chemistry. For example, Applied Biosystems (Foster City, Calif.) offers commercially available MAP resins, such as, for example, the Fmoc Resin 4 Branch and the Fmoc Resin 8 Branch which can be used to synthesize MAPs. Cleavage of MAPs from the resin is performed with standard trifloroacetic acid (TFA)-based cocktails known in the art. Purification of MAPs, except for desalting, is not generally necessary. MAP peptides can be used in immunizing vaccines which elicit antibodies that recognize both the MAP and the native protein from which the peptide was derived.

[0121] Epitope-bearing peptides of the invention can also be incorporated into a coat protein of a virus, which can then be used as an immunogen or a vaccine with which to immunize animals, including humans, in order stimulate the production of anti-epitope antibodies. For example, the V3 loop of the gp120 glycoprotein of the human immunodeficiency virus type 1 (HIV-1) has been engineered to be expressed on the surface of rhinovirus. Immunization with rhinovirus displaying the V3 loop peptide yielded apparently effective mimics of the HIV-1 immunogens (as measured by their ability to be neutralized by anti-HIV-1 antibodies as well as by their ability to elicit the production of antibodies capable of neutralizing HIV-1 in cell culture). This techniques of using engineered viral particles as immunogens is described in more detail in Smith et al., 1997, Behring Inst Mitt Feb, (98):229-39; Smith et al., 1998, J. Virol., 72:651-659; and Zhang et al., 1999, Biol. Chem., 380:365-74), which are hereby incorporated by reference herein in their entireties.

[0122] Moreover, polypeptides or peptides containing epitopes according to the present invention can be modified, for example, by the addition of amino acids at the amino- and/or carboxy-terminus of the peptide. Such modifications are performed, for example, to alter the conformation of the epitope bearing polypeptide such that the epitope will have a conformation more closely related to the structure of the epitope in the native protein. An example of a modified epitope-bearing polypeptide of the invention is a polypeptide in which one or more cysteine residues have been added to the polypeptide to allow for the formation of a disulfide bond between two cysteines, thus resulting in a stable loop structure of the epitope-bearing polypeptide under non-reducing conditions. Disulfide bonds can form between a cysteine residue added to the polypeptide and a cysteine residue of the naturally-occurring epitope, or between two cysteines which have both been added to the naturally-occurring epitope-bearing polypeptide.

[0123] In addition, it is possible to modify one or more amino acid residues of the naturally-occurring epitope-bearing polypeptide by substitution with cysteines to promote the formation of disulfide bonded loop structures. Cyclic thioether molecules of synthetic peptides can be routinely generated using techniques known in the art, e.g., as described in PCT publication WO 97/46251, incorporated in its entirety by reference herein. Other modifications of epitope-bearing polypeptides contemplated by this invention include biotinylation.

[0124] For the production of antibodies in vivo, host animals, such as rabbits, rats, mice, sheep, or goats, are immunized with either free or carrier-coupled peptides or MAP peptides, for example, by intraperitoneal and/or intradermal injection. Injection material is typically an emulsion containing about 100 μg of peptide or carrier protein and Freund's adjuvant, or any other adjuvant known for stimulating an immune response. Several booster injections may be needed, for instance, at intervals of about two weeks, to provide a useful titer of anti-peptide antibody which can be detected, for example, by ELISA assay using free peptide adsorbed to a solid surface. The titer of anti-peptide antibodies in serum from an immunized animal can be increased by selection of anti-peptide antibodies, e.g., by adsorption of the peptide onto a solid support and elution of the selected antibodies according to methods well known in the art.

[0125] As one having skill in the art will appreciate, and as discussed above, the tyrosine kinase biomarker polypeptides of the present invention, which include the following: e.g., members of the Src family of tyrosine kinases, such as Src, Fgr, Fyn, Yes, Blk, Hck, Lck and Lyn, as well as other protein tyrosine kinases, including, Bcr-abl, Jak, PDGFR, c-kit and Eph receptors, and which comprise an immunogenic or antigenic epitope, can be fused to other polypeptide sequences. For example, the polypeptides of the present invention can be fused with the constant domain of immunoglobulins (IgA, IgE, IgG, IgD, or IgM), or portions thereof, e.g., CH1, CH2, CH3, or any combination thereof, and portions thereof, or with albumin (including, but not limited to, recombinant human albumin, or fragments or variants thereof (see, e.g., U.S. Pat. No. 5,876,969; EP Patent No. 0 413 622; and U.S. Pat. No. 5,766,883, incorporated by reference in their entirety herein), thereby resulting in chimeric polypeptides. Such fusion proteins may facilitate purification and may increase half-life in vivo. This has been shown for chimeric proteins containing the first two domains of the human CD4-polypeptide and various domains of the constant regions of the heavy or light chains of mammalian immunoglobulins. (see, e.g., Traunecker et al., 1988, Nature, 331:84-86).

[0126] Enhanced delivery of an antigen across the epithelial barrier to the immune system has been demonstrated for antigens (e.g., insulin) conjugated to an FcRn binding partner, such as IgG or Fc fragments (see, e.g., WO 96/22024 and WO 99/04813). IgG fusion proteins that have a disulfide-linked dimeric structure due to the IgG portion disulfide bonds have also been found to be more efficient in binding and neutralizing other molecules than are monomeric polypeptides, or fragments thereof, alone. (See, e.g., Fountoulakis et al., 1995, J. Biochem., 270:3958-3964).

[0127] Nucleic acids encoding epitopes can also be recombined with a polynucleotide of interest as an epitope tag (e.g., the hemagglutinin (“HA”) tag or flag tag) to aid in detection and purification of the expressed polypeptide. For example, a system for the ready purification of non-denatured fusion proteins expressed in human cell lines has been described by Janknecht et al., (1991, Proc. Natl. Acad. Sci. USA, 88:8972-897). In this system, the polynucleotide of interest is subcloned into a vaccinia recombination plasmid such that the open reading frame of the polynucleotide is translationally fused to an amino-terminal tag having six histidine residues. The tag serves as a matrix binding domain for the fusion protein. Extracts from cells infected with the recombinant vaccinia virus are loaded onto an Ni²⁺ nitriloacetic acid-agarose column and histidine-tagged proteins are selectively eluted with imidazole-containing buffers.

[0128] Additional fusion proteins of the invention can be generated by employing the techniques of gene-shuffling, motif-shuffling, exon-shuffling, and/or codon-shuffling (collectively referred to as “DNA shuffling”). DNA shuffling can be employed to modulate the activities of polypeptides of the invention; such methods can be used to generate polypeptides with altered activity, as well as agonists and antagonists of the polypeptides. See, generally, U.S. Pat. Nos. 5,605,793; 5,811,238; 5,830,721; 5,834,252; and 5,837,458, and Patten et al., 1997, Curr. Opinion Biotechnol., 8:724-33; Harayama, 1998, Trends Biotechnol., 16(2):76-82; Hansson, et al., 1999, J. Mol. Biol., 287:265-76; and Lorenzo and Blasco, 1998, Biotechniques, 24(2):308-313, the contents of each of which are hereby incorporated by reference in its entirety.

[0129] In an embodiment of the invention, alteration of polynucleotides corresponding to one or more of the src biomarker polynucleotide sequences as set forth in Table 2, and the polypeptides encoded by these polynucleotides, can be achieved by DNA shuffling. DNA shuffling involves the assembly of two or more DNA segments by homologous or site-specific recombination to generate variation in the polynucleotide sequence. In another embodiment, polynucleotides of the invention, or their encoded polypeptides, may be altered by being subjected to random mutapolynucleotidesis by error-prone PCR, random nucleotide insertion, or other methods, prior to recombination. In another embodiment, one or more components, motifs, sections, parts, domains, fragments, etc., of a polynucleotide encoding a polypeptide of this invention may be recombined with one or more components, motifs, sections, parts, domains, fragments, etc. of one or more heterologous molecules.

[0130] Another aspect of the present invention relates to antibodies and T-cell antigen receptors (TCRs), which immunospecifically bind to a polypeptide, polypeptide fragment, or variant one or more of the src biomarker amino acid sequences as set forth in Table 2, and/or an epitope thereof, of the present invention (as determined by immunoassays well known in the art for assaying specific antibody-antigen binding).

[0131] A bispecific or bifunctional antibody is an artificial hybrid antibody having two different heavy/light chain pairs and two different binding sites. Bispecific antibodies can be produced by a variety of methods, including fusion of hybridomas or linking of Fab′ fragments. (See, e.g., Songsivilai & Lachmann, 1990, Clin. Exp. Immunol., 79:315-321; Kostelny et al., 1992, J. Immunol., 148:1547 1553). In addition, bispecific antibodies can be formed as “diabodies” (See, Holliger et al., 1993, Proc. Natl. Acad. Sci. USA, 90:6444-6448), or “Janusins” (See, Traunecker et al., 1991, EMBO J., 10:3655-3659 and Traunecker et al., 1992, Int. J. Cancer Suppl. 7:51-52-127).

[0132] Antibodies of the invention include, but are not limited to, polyclonal, monoclonal, multispecific, human, humanized or chimeric antibodies, single chain antibodies, Fab fragments, F(ab′) fragments, fragments produced by a Fab expression library, anti-idiotypic (anti-Id) antibodies (including, e.g., anti-Id antibodies to antibodies of the invention), intracellularly made antibodies (i.e., intrabodies), and epitope-binding fragments of any of the above. The term “antibody”, as used herein, refers to immunoglobulin molecules and immunologically active portions or fragments of immunoglobulin molecules, i.e., molecules that contain an antigen binding site that immunospecifically binds an antigen. The immunoglobulin molecules of the invention can be of any type (e.g., IgG, IgE, IgM, IgD, IgA and IgY), class or subclass (e.g., IgG1, IgG2, IgG3, IgG4, IgA1 and IgA2) of immunoglobulin molecule. Preferably, immunoglobulin is an IgG1, an IgG2, or an IgG4 isotype.

[0133] Immunoglobulins may have both a heavy and a light chain. An array of IgG, IgE, IgM, IgD, IgA, and IgY heavy chains can be paired with a light chain of the kappa or lambda types. Most preferably, the antibodies of the present invention are human antigen-binding antibodies and antibody fragments and include, but are not limited to, Fab, Fab′ F(ab′) 2, Fd, single-chain Fvs (scFv), single-chain antibodies, disulfide-linked Fvs (sdFv) and fragments comprising either a V_{L} or V_{H} domain. Antigen-binding antibody fragments, including single-chain antibodies, can comprise the variable region(s) alone or in combination with the entirety or a portion of the following: hinge region, and CH1, CH2, and CH3 domains. Also included in connection with the invention are antigen-binding fragments comprising any combination of variable region(s) with a hinge region, and CH1, CH2, and CH3 domains. The antibodies of the invention can be from any animal origin including birds and mammals. Preferably, the antibodies are of human, murine (e.g., mouse and rat), donkey, sheep, rabbit, goat, guinea pig, camel, horse, or chicken origin. As used herein, “human” antibodies include antibodies having the amino acid sequence of a human immunoglobulin and include antibodies isolated from human immunoglobulin libraries or from animals transgenic for one or more human immunoglobulin and that do not express endogenous immunoglobulins, as described infra and, for example, in U.S. Pat. No. 5,939,598.

[0134] The antibodies of the present invention can be monospecific, bispecific, trispecific, or of greater multispecificity. Multispecific antibodies can be specific for different epitopes of a polypeptide of the present invention, or can be specific for both a polypeptide of the present invention, and a heterologous epitope, such as a heterologous polypeptide or solid support material. (See, e.g., WO 93/17715; WO 92/08802; WO 91/00360; WO 92/05793; Tutt et al., 1991, J. Immunol., 147:60-69; U.S. Pat. Nos. 4,474,893; 4,714,681; 4,925,648; 5,573,920; 5,601,819; and Kostelny et al., 1992, J. Immunol., 148:1547-1553).

[0135] Antibodies of the present invention can be described or specified in terms of the epitope(s) or portion(s) of a polypeptide of the present invention which they recognize or specifically bind. The epitope(s) or polypeptide portion(s) can be specified, e.g., by N-terminal and C-terminal positions, by size in contiguous amino acid residues, or as presented in the sequences defined in Table 2 herein. Further included in accordance with the present invention are antibodies which bind to polypeptides encoded by polynucleotides which hybridize to a polynucleotide of the present invention under stringent, or moderately stringent, hybridization conditions as described herein.

[0136] The antibodies of the invention (including molecules comprising, or alternatively consisting of, antibody fragments or variants thereof) can bind immunospecifically to a polypeptide or polypeptide fragment or to a variant human protein tyrosine kinase biomarker of the invention, e.g., the Src biomarker proteins as set forth in Table 2, and/or monkey src biomarker protein.

[0137] By way of non-limiting example, an antibody can be considered to bind to a first antigen preferentially if it binds to the first antigen with a dissociation constant (Kd) that is less than the antibody's Kd for the second antigen. In another non-limiting embodiment, an antibody can be considered to bind to a first antigen preferentially if it binds to the first antigen with an affinity that is at least one order of magnitude less than the antibody's Ka for the second antigen. In another non-limiting embodiment, an antibody can be considered to bind to a first antigen preferentially if it binds to the first antigen with an affinity that is at least two orders of magnitude less than the antibody's Kd for the second antigen.

[0138] In another nonlimiting embodiment, an antibody may be considered to bind to a first antigen preferentially if it binds to the first antigen with an off rate (koff) that is less than the antibody's koff for the second antigen. In another nonlimiting embodiment, an antibody can be considered to bind to a first antigen preferentially if it binds to the first antigen with an affinity that is at least one order of magnitude less than the antibody's koff for the second antigen. In another nonlimiting embodiment, an antibody can be considered to bind to a first antigen preferentially if it binds to the first antigen with an affinity that is at least two orders of magnitude less than the antibody's koff for the second antigen.

[0139] Antibodies of the present invention can also be described or specified in terms of their binding affinity to a tyrosine kinase biomarker polypeptide of the present invention, e.g., members of the Src family of tyrosine kinases, for example, Src, Fgr, Fyn, Yes, Blk, Hck, Lck and Lyn, as well as other protein tyrosine kinases, including, Bcr-abl, Jak, PDGFR, c-kit and Eph receptors. Preferred binding affinities include those with a dissociation constant or Kd of less than 5×10⁻² M, 1×10⁻² M, 5×10⁻³ M, 1×10⁻³ M, 5×10⁻⁴ M, or 1×10⁻⁴ M. More preferred binding affinities include those with a dissociation constant or Kd less than 5×10⁻⁵ M, 1×10⁻⁵ M, 5×10⁻⁶ M, 1×10⁻⁶ M, 5×10⁻⁷ M, 1×10⁻⁷ M, 5×10⁻⁸ M, or 1×10⁻⁸ M. Even more preferred antibody binding affinities include those with a dissociation constant or Kd of less than 5×10⁻⁹ M, 1×10⁻⁹ M, 5×10⁻¹⁰ M, 1×10⁻¹⁰ M, 5×10⁻¹¹ M, 1×10⁻¹¹ M, 5×10⁻¹² M, 1×10⁻¹² M, 5×10⁻¹³ M, 1×10⁻¹³M, 5×10⁻¹⁴ M, 1×10⁻¹⁴ M, 5×10⁻¹⁵ M, or 1×10⁻¹⁵ M.

[0140] In specific embodiments, antibodies of the invention bind to the protein tyrosine kinase biomarker polypeptides, or fragments, or variants thereof, with an off rate (koff) of less than or equal to about 5×10⁻² sec⁻¹, 1×10⁻² sec⁻¹, 5×10⁻³ sec⁻¹, or 1×10⁻³ sec⁻¹. More preferably, antibodies of the invention bind to src biomarker protein polypeptides or fragments or variants thereof with an off rate (koff) of less than or equal to about 5×10⁻⁴ sec⁻¹, 1×10⁻⁴ sec⁻¹, 5×10⁻⁵ sec⁻¹, 1×10⁻⁵ sec⁻¹, 5×10⁻⁶ sec⁻¹, 1×10⁻⁶ sec⁻¹, 5×10⁻⁷ sec⁻¹, or 1×10⁻⁷ sec⁻¹.

[0141] In other embodiments, antibodies of the invention bind to protein tyrosine kinase biomarker polypeptides or fragments or variants thereof with an on rate (kon) of greater than or equal to 1×10³ M⁻¹ sec⁻¹, 5×10³ M⁻¹ sec⁻¹, 1×10⁴ M⁻¹ sec⁻¹, or 5×10⁴ M⁻¹ sec¹. More preferably, antibodies of the invention bind to protein tyrosine kinase biomarker polypeptides or fragments or variants thereof with an on rate greater than or equal to 1×10⁵ M⁻¹ sec⁻¹, 5×10⁻⁵ M⁻¹ sec⁻¹, 1×10⁻⁶ M⁻¹ sec−1, 5×10⁻⁶ M⁻¹ sec⁻¹, or 1×10⁻⁷ M⁻¹ sec¹.

[0142] The present invention also provides antibodies that competitively inhibit the binding of an antibody to an epitope of the invention as determined by any method known in the art for determining competitive binding, for example, the immunoassays as described herein. In preferred embodiments, the antibody competitively inhibits binding to an epitope by at least 95%, at least 90%, at least 85%, at least 80%, at least 75%, at least 70%, at least 60%, or at least 50%.

[0143] Antibodies of the present invention can act as agonists or antagonists of the protein tyrosine kinase biomarker polypeptides of the present invention. For example, the present invention includes antibodies which disrupt receptor/ligand interactions with polypeptides of the invention either partially or fully. The invention includes both receptor-specific antibodies and ligand-specific antibodies. The invention also includes receptor-specific antibodies which do not prevent ligand binding, but do prevent receptor activation. Receptor activation (i.e., signaling) can be determined by techniques described herein or as otherwise known in the art. For example, receptor activation can be determined by detecting the phosphorylation (e.g., on tyrosine or serine/threonine) of the receptor or its substrate by immunoprecipitation followed by Western Blot analysis. In specific embodiments, antibodies are provided that inhibit ligand activity or receptor activity by at least 95%, at least 90%, at least 85%, at least 80%, at least 75%, at least 70%, at least 60%, or at least 50% of the activity in the absence of the antibody.

[0144] In another embodiment of the present invention, antibodies that immunospecifically bind to a protein tyrosine kinase biomarker, or a fragment or variant thereof, comprise a polypeptide having the amino acid sequence of any one of the heavy chains expressed by an anti-protein tyrosine kinase biomarker antibody-expressing cell line of the invention, and/or any one of the light chains expressed by an anti-protein tyrosine kinase biomarker antibody-expressing cell line of the invention.

[0145] In another embodiment of the present invention, antibodies that immunospecifically bind to a tyrosine kinase biomarker protein or a fragment or variant thereof, comprise a polypeptide having the amino acid sequence of any one of the V_{H} domains of a heavy chain expressed by an anti-protein tyrosine kinase biomarker antibody-expressing cell line, and/or any one of the V_{L} domains of a light chain expressed by an anti-protein tyrosine kinase biomarker antibody-expressing cell line. In preferred embodiments, antibodies of the present invention comprise the amino acid sequence of a V_{H} domain and V_{L} domain expressed by a single anti-protein tyrosine kinase biomarker protein antibody-expressing cell line. In alternative embodiments, antibodies of the present invention comprise the amino acid sequence of a V_{H} domain and a V_{L} domain expressed by two different anti-protein tyrosine kinase biomarker antibody-expressing cell lines.

[0146] Molecules comprising, or alternatively consisting of, antibody fragments or variants of the V_{H} and/or V_{L} domains expressed by an anti-protein tyrosine kinase biomarker antibody-expressing cell line that immunospecifically bind to a tyrosine kinase biomarker protein, e.g., Src tyrosine kinase, are also encompassed by the invention, as are nucleic acid molecules encoding these V_{H} and V_{L} domains, molecules, fragments and/or variants.

[0147] The present invention also provides antibodies that immunospecificially bind to a polypeptide, or polypeptide fragment or variant of a tyrosine kinase biomarker protein, e.g., a Src kinase biomarker protein, wherein such antibodies comprise, or alternatively consist of, a polypeptide having an amino acid sequence of any one, two, three, or more of the V_{H} CDRs contained in a heavy chain expressed by one or more anti-tyrosine kinase biomarker protein antibody expressing cell lines. In particular, the invention provides antibodies that immunospecifically bind to a tyrosine kinase biomarker protein, comprising, or alternatively consisting of, a polypeptide having the amino acid sequence of a V_{H} CDR1 contained in a heavy chain expressed by one or more anti-tyrosine kinase biomarker protein antibody expressing cell lines. In another embodiment, antibodies that immunospecifically bind to a tyrosine kinase biomarker protein, comprise, or alternatively consist of, a polypeptide having the amino acid sequence of a V_{H} CDR2 contained in a heavy chain expressed by one or more anti-tyrosine kinase biomarker protein antibody expressing cell lines. In a preferred embodiment, antibodies that immunospecifically bind to a tyrosine kinase biomarker protein, comprise, or alternatively consist of, a polypeptide having the amino acid sequence of a V_{H} CDR3 contained in a heavy chain expressed by one or more anti-tyrosine kinase biomarker protein antibody expressing cell line of the invention. Molecules comprising, or alternatively consisting of, these antibodies or antibody fragments or variants thereof that immunospecifically bind to a tyrosine kinase biomarker protein or a tyrosine kinase biomarker protein fragment or variant thereof are also encompassed by the invention, as are nucleic acid molecules encoding these antibodies, molecules, fragments and/or variants.

[0148] The present invention also provides antibodies that immunospecificially bind to a polypeptide, or polypeptide fragment or variant of a tyrosine kinase biomarker protein, e.g., a Src kinase biomarker protein, wherein the antibodies comprise, or alternatively consist of, a polypeptide having an amino acid sequence of any one, two, three, or more of the V_{L} CDRs contained in a heavy chain expressed by one or more anti-tyrosine kinase biomarker protein antibody expressing cell lines of the invention. In particular, the invention provides antibodies that immunospecifically bind to a tyrosine kinase biomarker protein, comprising, or alternatively consisting of, a polypeptide having the amino acid sequence of a V_{L} CDR1 contained in a heavy chain expressed by one or more anti-tyrosine kinase biomarker protein antibody-expressing cell lines of the invention. In another embodiment, antibodies that immunospecifically bind to a src biomarker protein, comprise, or alternatively consist of, a polypeptide having the amino acid sequence of a V_{L} CDR2 contained in a heavy chain expressed by one or more anti-tyrosine kinase biomarker protein antibody-expressing cell lines of the invention. In a preferred embodiment, antibodies that immunospecifically bind to a tyrosine kinase biomarker protein, comprise, or alternatively consist of, a polypeptide having the amino acid sequence of a V_{L} CDR3 contained in a heavy chain expressed by one or more anti-tyrosine kinase biomarker protein antibody-expressing cell lines of the invention. Molecules comprising, or alternatively consisting of, these antibodies, or antibody fragments or variants thereof, that immunospecifically bind to a tyrosine kinase biomarker protein or a tyrosine kinase biomarker protein fragment or variant thereof are also encompassed by the invention, as are nucleic acid molecules encoding these antibodies, molecules, fragments and/or variants.

[0149] The present invention also provides antibodies (including molecules comprising, or alternatively consisting of, antibody fragments or variants) that immunospecifically bind to a tyrosine kinase biomarker protein, polypeptide or polypeptide fragment or variant of a tyrosine kinase biomarker protein, e.g., Src tyrosine kinase, wherein the antibodies comprise, or alternatively consist of, one, two, three, or more V_{H} CDRs, and one, two, three or more V_{L} CDRs, as contained in a heavy chain or light chain expressed by one or more anti-tyrosine kinase biomarker protein antibody-expressing cell lines of the invention. In particular, the invention provides antibodies that immunospecifically bind to a polypeptide or polypeptide fragment or variant of a tyrosine kinase biomarker protein, wherein the antibodies comprise, or alternatively consist of, a V_{H} CDR1 and a V_{L} CDR1, a V_{H} CDR1 and a V_{L} CDR2, a V_{H} CDR1 and a V_{L} CDR3, a V_{H} CDR2 and a V_{L} CDR1, V_{H} CDR2 and V_{L} CDR2, a V_{H} CDR2 and a V_{L} CDR3, a V_{H} CDR3 and a V_{H} CDR1, a V_{H} CDR3 and a V_{L} CDR2, a V_{H} CDR3 and a V_{L} CDR3, or any combination thereof, of the V_{H} CDRs and V_{L} CDRs contained in a heavy chain or light chain immunoglobulin molecule expressed by one or more anti-tyrosine kinase biomarker protein antibody-expressing cell lines of the invention. In a preferred embodiment, one or more of these combinations are from a single anti-tyrosine kinase biomarker protein antibody-expressing cell line of the invention. Molecules comprising, or alternatively consisting of, fragments or variants of these antibodies that immunospecifically bind to the tyrosine kinase biomarker proteins are also encompassed by the invention, as are nucleic acid molecules encoding these antibodies, molecules, fragments or variants.

[0150] The present invention also provides nucleic acid molecules, generally isolated, encoding an antibody of the invention (including molecules comprising, or alternatively consisting of, antibody fragments or variants thereof). In a specific embodiment, a nucleic acid molecule of the invention encodes an antibody (including molecules comprising, or alternatively consisting of, antibody fragments or variants thereof), comprising, or alternatively consisting of, a V_{H} domain having an amino acid sequence of any one of the V_{H} domains of a heavy chain expressed by an anti-tyrosine kinase biomarker protein antibody-expressing cell line of the invention and a V_{L} domain having an amino acid sequence of a light chain expressed by an anti-tyrosine kinase biomarker protein antibody-expressing cell line of the invention. In another embodiment, a nucleic acid molecule of the invention encodes an antibody (including molecules comprising, or alternatively consisting of, antibody fragments or variants thereof), comprising, or alternatively consisting of, a V_{H} domain having an amino acid sequence of any one of the V_{H} domains of a heavy chain expressed by an anti-tyrosine kinase biomarker protein antibody-expressing cell line of the invention, or a V_{L} domain having an amino acid sequence of a light chain expressed by an anti-tyrosine kinase biomarker protein antibody-expressing cell line of the invention.

[0151] The present invention also provides antibodies that comprise, or alternatively consist of, variants (including derivatives) of the antibody molecules (e.g., the V_{H} domains and/or V_{L} domains) described herein, which antibodies immunospecifically bind to a tyrosine kinase biomarker protein or fragment or variant thereof, e.g., a Src tyrosine kinase polypeptide.

[0152] Standard techniques known to those of skill in the art can be used to introduce mutations in the nucleotide sequence encoding a molecule of the invention, including, for example, site-directed mutapolynucleotidesis and PCR-mediated mutapolynucleotidesis which result in amino acid substitutions. Preferably the molecules are immunoglobulin molecules. Also preferably, the variants (including derivatives) encode less than 50 amino acid substitutions, less than 40 amino acid substitutions, less than 30 amino acid substitutions, less than 25 amino acid substitutions, less than 20 amino acid substitutions, less than 15 amino acid substitutions, less than 10 amino acid substitutions, less than 5 amino acid substitutions, less than 4 amino acid substitutions, less than 3 amino acid substitutions, or less than 2 amino acid substitutions, relative to the reference V_{H} domain, V_{H} CDR1, V_{H} CDR2, V_{H} CDR3, V_{L} domain, V_{L} CDR1, V_{L} CDR2, or V_{L} CDR3.

[0153] A “conservative amino acid substitution” is one in which the amino acid residue is replaced with an amino acid residue having a side chain with a similar charge. Families of amino acid residues having side chains with similar charges have been defined in the art. These families include amino acids with basic side chains (e.g., lysine, arginine, histidine), acidic side chains (e.g., aspartic acid, glutamic acid), uncharged polar side chains (e.g., glycine, asparagine, glutamine, serine, threonine, tyrosine, cysteine), nonpolar side chains (e.g., alanine, valine, leucine, isoleucine, proline, phenylalanine, methionine, tryptophan), beta-branched side chains (e.g., threonine, valine, isoleucine) and aromatic side chains (e.g., tyrosine, phenylalanine, tryptophan, histidine). Alternatively, mutations can be introduced randomly along all or part of the coding sequence, such as by saturation mutapolynucleotidesis. The resultant mutants can be screened for biological activity to identify mutants that retain activity.

[0154] For example, it is possible to introduce mutations only in framework regions or only in CDR regions of an antibody molecule. Introduced mutations can be silent or neutral missense mutations, i.e., have no, or little, effect on an antibody's ability to bind antigen. These types of mutations can be useful to optimize codon usage, or to improve hybridoma antibody production. Alternatively, non-neutral missense mutations can alter an antibody's ability to bind antigen. The location of most silent and neutral missense mutations is likely to be in the framework regions, while the location of most non-neutral missense mutations is likely to be in the CDRs, although this is not an absolute requirement. One of skill in the art is able to design and test mutant molecules with desired properties, such as no alteration in antigen binding activity or alteration in binding activity (e.g., improvements in antigen binding activity or change in antibody specificity). Following mutapolynucleotidesis, the encoded protein may routinely be expressed and the functional and/or biological activity of the encoded protein can be determined using techniques described herein or by routinely modifying techniques known and practiced in the art.

[0155] In a specific embodiment, an antibody of the invention (including a molecule comprising, or alternatively consisting of, an antibody fragment or variant thereof), that immunospecifically binds to protein tyrosine kinase biomarker polypeptides or fragments or variants thereof, comprises, or alternatively consists of, an amino acid sequence encoded by a nucleotide sequence that hybridizes to a nucleotide sequence that is complementary to that encoding one of the V_{H} or V_{L} domains expressed by one or more anti-tyrosine kinase biomarker protein antibody-expressing cell lines of the invention, preferably under stringent conditions, e.g., hybridization to filter-bound DNA in 6× sodium chloride/sodium citrate (SSC) at about 45° C. followed by one or more washes in 0.2×SSC/0.1% SDS at about 50° C.-65° C., preferably under highly stringent conditions, e.g., hybridization to filter-bound nucleic acid in 6×SSC at about 45° C. followed by one or more washes in 0.1×SSC/0.2% SDS at about 68° C., or under other stringent hybridization conditions which are known to those of skill in the art (see, for example, Ausubel, F. M. et al., eds., 1989, Current Protocols in Molecular Biology, Vol. I, Green Publishing Associates, Inc. and John Wiley & Sons, Inc., New York at pages 6.3.1-6.3.6 and 2.10.3). Nucleic acid molecules encoding these antibodies are also encompassed by the invention.

[0156] It is well known within the art that polypeptides, or fragments or variants thereof, with similar amino acid sequences often have similar structure and many of the same biological activities. Thus, in one embodiment, an antibody (including a molecule comprising, or alternatively consisting of, an antibody fragment or variant thereof), that immunospecifically binds to a protein tyrosine kinase biomarker polypeptide or fragments or variants of a tyrosine kinase biomarker polypeptide, comprises, or alternatively consists of, a V_{H} domain having an amino acid sequence that is at least 35%, at least 40%, at least 45%, at least 50%, at least 55%, at least 60%, at least 65%, at least 70%, at least 75%, at least 80%, at least 85%, at least 90%, at least 95%, or at least 99% identical to the amino acid sequence of a V_{H} domain of a heavy chain expressed by an anti-tyrosine kinase biomarker protein antibody-expressing cell line of the invention.

[0157] In another embodiment, an antibody (including a molecule comprising, or alternatively consisting of, an antibody fragment or variant thereof), that immunospecifically binds to a tyrosine kinase biomarker polypeptide, or fragments or variants of a tyrosine kinase biomarker protein polypeptide, comprises, or alternatively consists of, a V_{L} domain having an amino acid sequence that is at least 35%, at least 40%, at least 45%, at least 50%, at least 55%, at least 60%, at least 65%, at least 70%, at least 75%, at least 80%, at least 85%, at least 90%, at least 95%, or at least 99% identical to the amino acid sequence of a V_{L} domain of a light chain expressed by an anti-tyrosine kinase biomarker protein antibody-expressing cell line of the invention.

[0158] The present invention also provides antibodies (including molecules comprising, or alternatively consisting of, antibody fragments or variants thereof), that down-regulate the cell-surface expression of a tyrosine kinase biomarker protein, as determined by any method known in the art such as, for example, FACS analysis or immunofluorescence assays. By way of a non-limiting hypothesis, such down-regulation can be the result of antibody-induced internalization of a tyrosine kinase biomarker protein. Such antibodies can comprise, or alternatively consist of, a portion (e.g., V_{H} CDR1, V_{H} CDR2, V_{H} CDR3, V_{L} CDR1, V_{L} CDR2, or V_{L} CDR3) of a V_{H} or V_{L} domain having an amino acid sequence of an antibody of the invention, or a fragment or variant thereof.

[0159] In another embodiment, an antibody that down-regulates the cell-surface expression of a tyrosine kinase biomarker protein comprises, or alternatively consists of, a polypeptide having the amino acid sequence of a V_{H} domain of an antibody of the invention, or a fragment or variant thereof and a V_{L} domain of an antibody of the invention, or a fragment or variant thereof. In another embodiment, an antibody that down-regulates the cell-surface expression of a tyrosine kinase biomarker protein comprises, or alternatively consists of, a polypeptide having the amino acid sequence of a V_{H} domain and a V_{L} domain from a single antibody (or scFv or Fab fragment) of the invention, or fragments or variants thereof. In another embodiment, an antibody that down-regulates the cell-surface expression of a tyrosine kinase biomarker protein comprises, or alternatively consists of, a polypeptide having the amino acid sequence of a V_{H} domain of an antibody of the invention, or a fragment or variant thereof. In another embodiment, an antibody that down-regulates the cell-surface expression of a tyrosine kinase biomarker protein comprises, or alternatively consists of, a polypeptide having the amino acid sequence of a V_{L} domain of an antibody of the invention, or a fragment or variant thereof.

[0160] In a preferred embodiment, an antibody that down-regulates the cell-surface expression of a tyrosine kinase biomarker protein comprises, or alternatively consists of, a polypeptide having the amino acid sequence of a V_{H} CDR3 of an antibody of the invention, or a fragment or variant thereof. In another preferred embodiment, an antibody that down-regulates the cell-surface expression of a tyrosine kinase biomarker protein comprises, or alternatively consists of, a polypeptide having the amino acid sequence of a V_{L} CDR3 of an antibody of the invention, or a fragment or variant thereof. Nucleic acid molecules encoding these antibodies are also encompassed by the invention.

[0161] In another preferred embodiment, an antibody that enhances the activity of a tyrosine kinase biomarker protein, or a fragment or variant thereof, comprises, or alternatively consists of, a polypeptide having the amino acid sequence of a V_{L} CDR3 of an antibody of the invention, or a fragment or variant thereof. Nucleic acid molecules encoding these antibodies are also encompassed by the invention.

[0162] As nonlimiting examples, antibodies of the present invention can be used to purify, detect, and target the protein tyrosine kinase polypeptides of the present invention, including both in vitro and in vivo diagnostic, detection, screening, and/or therapeutic methods. For example, the antibodies have been used in immunoassays for qualitatively and quantitatively measuring levels of src biomarker polypeptides in biological samples. (See, e.g., Harlow et al., Antibodies: A Laboratory Manual, Cold Spring Harbor Laboratory Press, 2nd Ed. 1988, which is incorporated by reference herein in its entirety).

[0163] By way of another nonlimiting example, antibodies of the invention can be administered to individuals as a form of passive immunization. Alternatively, antibodies of the present invention can be used for epitope mapping to identify the epitope(s) that are bound by the antibody. Epitopes identified in this way can, in turn, for example, be used as vaccine candidates, i.e., to immunize an individual to elicit antibodies against the naturally-occurring forms of one or more tyrosine kinase biomarker proteins.

[0164] As discussed in more detail below, the antibodies of the present invention can be used either alone or in combination with other compositions. The antibodies can further be recombinantly fused to a heterologous polypeptide at the N- or C-terminus, or chemically conjugated (including covalent and non-covalent conjugations) to polypeptides or other compositions. For example, antibodies of the present invention can be recombinantly fused or conjugated to molecules that are useful as labels in detection assays and to effector molecules such as heterologous polypeptides, drugs, radionuclides, or toxins. See, e.g., PCT publications WO 92/08495; WO 91/14438; WO 89/12624; U.S. Pat. No. 5,314,995 and EP 396, 387.

[0165] The antibodies of the invention include derivatives that are modified, i.e., by the covalent attachment of any type of molecule to the antibody. For example, without limitation, the antibody derivatives include antibodies that have been modified, e.g., by glycosylation, acetylation, pegylation, phosphorylation, amidation, derivatization by known protecting/blocking groups, proteolytic cleavage, linkage to a cellular ligand or other protein, etc. Any of numerous chemical modifications can be carried out by known techniques, including, but not limited to, specific chemical cleavage, acetylation, formylation, metabolic synthesis of tunicamycin, and the like. In addition, the antibody derivative can contain one or more non-classical amino acids.

[0166] The antibodies of the present invention can be generated by any suitable method known in the art. Polyclonal antibodies directed against an antigen or immunogen of interest can be produced by various procedures well known in the art. For example, a tyrosine kinase biomarker polypeptide or peptide of the invention can be administered to various host animals as elucidated above to induce the production of sera containing polyclonal antibodies specific for the biomarker antigen. Various adjuvants can also be used to increase the immunological response, depending on the host species; adjuvants include, but are not limited to, Freund's (complete and incomplete), mineral gels such as aluminum hydroxide, surface active substances such as lysolecithin, pluronic polyols, polyanions, peptides, oil emulsions, keyhole limpet hemocyanins, dinitrophenol, and potentially useful human adjuvants such as BCG (bacille Calmette-Guerin) and corynebacterium parvum. Such adjuvants are also well known in the art.

[0167] Monoclonal antibodies can be prepared using a wide variety of techniques known in the art, including the use of hybridoma, recombinant and phage display technologies, or a combination thereof. For example, monoclonal antibodies can be produced using hybridoma techniques as known and practiced in the art and as taught, for example, in Kohler and Milstein, 1975, Nature, 256:495-497; Harlow et al., Antibodies: A Laboratory Manual, Cold Spring Harbor Laboratory Press, 2nd Ed. 1988; and Hammerling, et al., In: Monoclonal Antibodies and T-Cell Hybridomas, Elsevier, N.Y., pages 563-681, 1981, the contents of which are incorporated herein by reference in their entireties. The term “monoclonal antibody” as used herein is not limited to antibodies produced through hybridoma technology. The term “monoclonal antibody” refers to an antibody that is derived from a single clone, including any eukaryotic, prokaryotic, or phage clone, and does not necessarily refer to the method by which it is produced. Techniques involving continuous cell line cultures can also be used. In addition to the hybridoma technique, other techniques include the trioma technique, the human B-cell hybridoma technique (Kozbor et al., 1983, Immunol. Today, 4:72), and the EBV-hybridoma technique (Cole et al., 1985. In: Monoclonal Antibodies and Cancer Therapy, Alan R. Liss, Inc., pp. 77-96).

[0168] Methods for producing and screening for specific antibodies using hybridoma technology are routine and well known in the art. As a nonlimiting example, mice can be immunized with a tyrosine kinase polypeptide or peptide of the invention, or variant thereof, or with a cell expressing the polypeptide or peptide or variant thereof. Once an immune response is detected, e.g., antibodies specific for the antigen are detected in the sera of immunized mice, the spleen is harvested and splenocytes are isolated. The splenocytes are then fused by well known techniques to any suitable myeloma cells, for example cells from cell line SP2/0 or P3×63-AG8.653 available from the ATCC. Hybridomas are selected and cloned by limiting dilution techniques. The hybridoma clones are then assayed by methods known in the art to determine and select those cells that secrete antibodies capable of binding to a polypeptide of the invention. Ascites fluid, which generally contains high levels of antibodies, can be generated by immunizing mice with positive hybridoma clones.

[0169] Another well known method for producing both polyclonal and monoclonal human B cell lines is transformation using Epstein Barr Virus (EBV). Protocols for generating EBV-transformed B cell lines are commonly known in the art, such as, for example, the protocol outlined in Chapter 7.22 of Current Protocols in Immunology, Coligan et al., Eds., 1994, John Wiley & Sons, NY, which is hereby incorporated by reference herein in its entirety. The source of B cells for transformation is commonly human peripheral blood, but B cells for transformation can also be obtained from other sources including, but not limited to, lymph node, tonsil, spleen, tumor tissue, and infected tissues. Tissues are generally prepared as single cell suspensions prior to EBV transformation. In addition, T cells that may be present in the B cell samples can be either physically removed or inactivated (e.g., by treatment with cyclosporin A). The removal of T cells is often advantageous, because T cells from individuals seropositive for anti-EBV antibodies can suppress B cell immortalization by EBV. In general, a sample containing human B cells is innoculated with EBV and cultured for 3-4 weeks. A typical source of EBV is the culture supernatant of the B95-8 cell line (ATCC; VR-1492). Physical signs of EBV transformation can generally be seen toward the end of the 3-4 week culture period.

[0170] By phase-contrast microscopy, transformed cells appear large, clear and “hairy”; they tend to aggregate in tight clusters of cells. Initially, EBV lines are generally polyclonal. However, over prolonged periods of cell culture, EBV lines can become monoclonal as a result of the selective outgrowth of particular B cell clones. Alternatively, polyclonal EBV transformed lines can be subcloned (e.g., by limiting dilution) or fused with a suitable fusion partner and plated at limiting dilution to obtain monoclonal B cell lines. Suitable fusion partners for EBV transformed cell lines include mouse myeloma cell lines (e.g., SP2/0, X63-Ag8.653), heteromyeloma cell lines (human×mouse; e.g., SPAM-8, SBC-H20, and CB-F7), and human cell lines (e.g., GM 1500, SKO-007, RPMI 8226, and KR-4). Thus, the present invention also includes a method of generating polyclonal or monoclonal human antibodies against protein tyrosine kinase polypeptides and peptides of the invention, or fragments thereof, comprising EBV-transformation of human B cells.

[0171] Antibody fragments that recognize specific epitopes can be generated by known techniques. For example, Fab and F(ab′)2 fragments of the invention can be produced by proteolytic cleavage of immunoglobulin molecules, using enzymes such as papain (to produce Fab fragments) or pepsin (to produce F (ab′)2 fragments). F(ab′)2 fragments contain the variable region, the light chain constant region and the CH1 domain of the heavy chain.

[0172] Antibodies encompassed by the present invention can also be generated using various phage display methods known in the art. In phage display methods, functional antibody domains are displayed on the surface of phage particles which carry the polynucleotide sequences encoding them. In a particular embodiment, such phage can be utilized to display antigen binding domains expressed from a repertoire or combinatorial antibody library (e.g., human or murine). Phage expressing an antigen binding domain that binds to the antigen of interest can be selected or identified with antigen, e.g., using labeled antigen or antigen bound or captured onto a solid surface or bead. Phage used in these methods are typically filamentous phage including fd and M13 binding domains expressed from phage with Fab, Fv, or disulfide stabilized antibody domains recombinantly fused to either the phage polynucleotide III or polynucleotide VIII protein. Examples of phage display methods that can be used to make the antibodies of the present invention include those disclosed in Brinkman et al., 1995, J. Immunol. Methods, 182:41-50; Ames et al., 1995, J. Immunol. Methods, 184:177-186; Kettleborough et al., 1994, Eur. J. Immunol., 24:952-958; Persic et al., 1997, Gene, 187:9-18; Burton et al., 1994, Advances in Immunology, 57:191-280; PCT application No. PCT/GB91/01134; PCT publications WO 90/02809; WO 91/10737; WO 92/01047; WO 92/18619; WO 93/11236; WO 95/15982; WO 95/20401; and U.S. Pat. Nos. 5,698,426; 5,223,409; 5,403,484; 5,580,717; 5,427,908; 5,750,753; 5,821,047; 5,571,698; 5,427,908; 5,516,637; 5,780,225; 5,658,727; 5,733,743 and 5,969,108, each of which is incorporated herein by reference in its entirety.

[0173] As described in the above references, after phage selection, the antibody coding regions from the phage can be isolated and used to generate whole antibodies, including human antibodies, or any other desired antigen binding fragment, and expressed in any desired host, including mammalian cells, insect cells, plant cells, yeast, and bacteria, e.g., as described in detail below.

[0174] Examples of techniques that can be used to produce single-chain Fvs and antibodies include those described in U.S. Pat. Nos. 4,946,778 and 5,258,498; Huston et al., 1991, Methods in Enzymology, 203:46-88; Shu et al., 1993, Proc. Natl. Acad. Sci. USA, 90:7995-7999; and Skerra et al., 1988, Science, 240:1038-1040. For some uses, including the in vivo use of antibodies in humans and in in vitro detection assays, it may be preferable to use chimeric, humanized, or human antibodies. A chimeric antibody is a molecule in which different portions of the antibody are derived from different animal species, such as antibodies having a variable region derived from a murine monoclonal immunoglobulin and a human immunoglobulin constant region. Methods for producing chimeric antibodies are known in the art. (See, e.g., Morrison, 1985, Science, 229:1202; Oi et al., 1986, BioTechniques, 4:214; Gillies et al., 1989, J. Immunol. Methods, 125:191-202; and U.S. Pat. Nos. 5,807,715; 4,816,567; and 4,816,397, which are incorporated herein by reference in their entirety).

[0175] Humanized antibodies are antibody molecules from non-human species that bind to the desired antigen and have one or more complementarity determining regions (CDRs) from the nonhuman species and framework regions from a human immunoglobulin molecule. Often, framework residues in the human framework regions are substituted with corresponding residues from the CDR and framework regions of the donor antibody to alter, preferably improve, antigen binding. These framework substitutions are identified by methods well known in the art, e.g., by modeling of the interactions of the CDR and framework residues to identify framework residues important for antigen binding, and by sequence comparison to identify unusual framework residues at particular positions. (See, e.g., Queen et al., U.S. Pat. Nos. 5,693,762 and 5,585,089; and Riechmann et al., 1988, Nature, 332:323, which are incorporated herein by reference in their entireties). Antibodies can be humanized using a variety of techniques known in the art, including, for example, CDR-grafting (EP 239,400; PCT publication WO 91/09967; U.S. Pat. Nos. 5,225,539; 5,530,101; and 5,585,089); veneering or resurfacing (EP 592,106; EP 519,596; Padlan, 1991, Molecular Immunology, 28(4/5):489-498; Studnicka et al., 1994, Protein Engineering, 7(6):805-814; Roguska et al., 1994, Proc. Natl. Acad. Sci. USA, 91:969-973; and chain shuffling (U.S. Pat. No. 5,565,332).

[0176] Completely human antibodies can be made by a variety of methods known in the art, including the phage display methods described above, using antibody libraries derived from human immunoglobulin sequences. See also, U.S. Pat. Nos. 4,444,887 and 4,716,111; and PCT publications WO 98/46645, WO 98/50433, WO 98/24893, WO 98/16654, WO 96/34096, WO 96/33735, and WO 91/10741; each of which is incorporated herein by reference in its entirety.

[0177] Completely human antibodies are particularly desirable for therapeutic treatment of human patients, so as to avoid or alleviate immune reaction to foreign protein. Human antibodies can be made by a variety of methods known in the art, including the phage display methods described above, using antibody libraries derived from human immunoglobulin sequences. See also, U.S. Pat. Nos. 4,444,887 and 4,716,111; and PCT publications WO 98/46645, WO 98/50433, WO 98/24893, WO 98/16654, WO 96/34096, WO 96/33735, and WO 91/10741; each of which is incorporated herein by reference in its entirety.

[0178] Human antibodies can also be produced using transgenic mice which are incapable of expressing functional endogenous immunoglobulins, but which can express human immunoglobulin polynucleotides. For example, the human heavy and light chain immunoglobulin polynucleotide complexes can be introduced randomly, or by homologous recombination, into mouse embryonic stem cells. Alternatively, the human variable region, constant region, and diversity region may be introduced into mouse embryonic stem cells, in addition to the human heavy and light chain polynucleotides. The mouse heavy and light chain immunoglobulin polynucleotides can be rendered nonfunctional separately or simultaneously with the introduction of human immunoglobulin loci by homologous recombination. In particular, homozygous deletion of the J_{H} region prevents endogenous antibody production. The modified embryonic stem cells are expanded and microinjected into blastocysts to produce chimeric mice. The chimeric mice are then bred to produce homozygous offspring which express human antibodies. The transgenic mice are immunized in the normal fashion with a selected antigen, e.g., all or a portion of a polypeptide of the invention.

[0179] Thus, using such a technique, it is possible to produce useful human IgG, IgA, IgM, IgD and IgE antibodies. For an overview of the technology for producing human antibodies, see Lonberg and Huszar, 1995, Intl. Rev. Immunol., 13:65-93. For a detailed discussion of the technology for producing human antibodies and human monoclonal antibodies and protocols for producing such antibodies, see, e.g., PCT publications WO 98/24893; WO 92/01047; WO 96/34096; WO 96/33735; European Patent No. 0 598 877; U.S. Pat. Nos. 5,413,923; 5,625,126; 5,633,425; 5,569,825; 5,661,016; 5,545,806; 5,814,318; 5,885,793; 5,916,771; 5,939,598; 6,075,181; and 6,114,598, which are incorporated by reference herein in their entirety. In addition, companies such as Abgenix, Inc. (Fremont, Calif.), Protein Design Labs, Inc. (Mountain View, Calif.) and Genpharm (San Jose, Calif.) can be engaged to provide human antibodies directed against a selected antigen using technology similar to the above described technologies.

[0180] Completely human antibodies which recognize a selected epitope can be generated using a technique referred to as “guided selection”. In this approach, a selected non-human monoclonal antibody, e.g., a mouse antibody, is used to guide the selection of a completely human antibody recognizing the same epitope. (Jespers et al., 1988, BioTechnology, 12:899-903).

[0181] Further, antibodies to the protein tyrosine kinase polypeptides of the invention can, in turn, be utilized to generate anti-idiotypic antibodies that “mimic” protein tyrosine kinase biomarker polypeptides of the invention using techniques well known to those skilled in the art. (See, e.g., Greenspan and Bona, 1989, FASEB J., 7(5):437-444 and Nissinoff, 1991, J. Immunol., 147(8):2429-2438). For example, antibodies which bind to and competitively inhibit polypeptide multimerization and/or binding of a polypeptide of the invention to a ligand can be used to generate anti-idiotypes that “mimic” the polypeptide multimerization and/or binding domain and, as a consequence, bind to and neutralize the polypeptide and/or its ligand, e.g., in therapeutic regimens. Such neutralizing anti-idiotypes or Fab fragments of such anti-idiotypes can be used to neutralize polypeptide ligand. For example, such anti-idiotypic antibodies can be used to bind a polypeptide of the invention and/or to bind its ligands/receptors, and thereby activate or block its biological activity.

[0182] Intrabodies are antibodies, often scFvs, that are expressed from a recombinant nucleic acid molecule and are engineered to be retained intracellularly (e.g., retained in the cytoplasm, endoplasmic reticulum, or periplasm of the host cells). Intrabodies can be used, for example, to ablate the function of a protein to which the intrabody binds. The expression of intrabodies can also be regulated through the use of inducible promoters in the nucleic acid expression vector comprising nucleic acid encoding the intrabody. Intrabodies of the invention can be produced using methods known in the art, such as those disclosed and reviewed in Chen et al., 1994, Hum. Polynucleotide Ther., 5:595-601; Marasco, W. A., 1997, Polynucleotide Ther., 4:11-15; Rondon and Marasco, 1997, Annu. Rev. Microbiol., 51:257-283; Proba et al., 1998, J. Mol. Biol., 275:245-253; Cohen et al., 1998, Oncogene, 17:2445-2456; Ohage and Steipe, 1999, J. Mol. Biol., 291:1119-1128; Ohage et al., 1999, J. Mol. Biol., 291:1129-1134; Wirtz and Steipe, 1999, Protein Sci., 8:2245-2250; and Zhu et al., 1999, J. Immunol. Methods, 231:207-222.

[0183] XenoMouse Technology Antibodies in accordance with the invention are preferably prepared by the utilization of a transgenic mouse that has a substantial portion of the human antibody producing genome inserted into its genome, but that is rendered deficient in the production of endogenous murine antibodies (e.g., XenoMouse strains available from Abgenix Inc., Fremont, Calif.). Such mice are capable of producing human immunoglobulin molecules and are virtually deficient in the production of murine immunoglobulin molecules. Technologies utilized for achieving the same are disclosed in the patents, applications, and references disclosed herein.

[0184] The ability to clone and reconstruct megabase-sized human loci in YACs and to introduce them into the mouse germline provides a powerful approach to elucidating the functional components of very large or crudely mapped loci, as well as generating useful models of human disease. Furthermore, the utilization of such technology for substitution of mouse loci with their human equivalents could provide unique insights into the expression and regulation of human polynucleotide products during development, their communication with other systems, and their involvement in disease induction and progression. An important practical application of such a strategy is the “humanization” of the mouse humoral immune system. Introduction of human immunoglobulin (Ig) loci into mice in which the endogenous Ig polynucleotides have been inactivated offers the opportunity to study the mechanisms underlying programmed expression and assembly of antibodies as well as their role in B cell development. Furthermore, such a strategy could provide an ideal source for the production of fully human monoclonal antibodies (Mabs), which is an important milestone toward fulfilling the promise of antibody therapy in human disease.

[0185] Fully human antibodies are expected to minimize the immunogenic and allergic responses intrinsic to mouse or mouse-derivatized monoclonal antibodies and thus to increase the efficacy and safety of the administered antibodies. The use of fully human antibodies can be expected to provide a substantial advantage in the treatment of chronic and recurring human diseases, such as cancer, which require repeated antibody administrations.

[0186] One approach toward this goal was to engineer mouse strains deficient in mouse antibody production to harbor large fragments of the human Ig loci in anticipation that such mice would produce a large repertoire of human antibodies in the absence of mouse antibodies. Large human Ig fragments would preserve the large variable polynucleotide diversity as well as the proper regulation of antibody production and expression. By exploiting the mouse machinery for antibody diversification and selection and the lack of immunological tolerance to human proteins, the reproduced human antibody repertoire in these mouse strains should yield high affinity antibodies against any antigen of interest, including human antigens. Using the hybridoma technology, antigen-specific human monoclonal antibodies with the desired specificity could be readily produced and selected.

[0187] This general strategy was demonstrated in connection with the generation of the first “XenoMouseT” strains as published in 1994. See Green et al., 1994, Nature Genetics, 7:13-21. The XenoMouse strains were engineered with yeast artificial chromosomes (YACS) containing 245 kb and 10, 190 kb-sized germline configuration fragments of the human heavy chain locus and kappa light chain locus, respectively, which contained core variable and constant region sequences. Id. The human Ig-containing YACs proved to be compatible with the mouse system for both rearrangement and expression of antibodies and were capable of substituting for the inactivated mouse Ig polynucleotides. This was demonstrated by their ability to induce B-cell development, to produce an adult-like human repertoire of fully human antibodies, and to generate antigen-specific human monoclonal antibodies. These results also suggested that introduction of larger portions of the human Ig loci containing greater numbers of V polynucleotides, additional regulatory elements, and human Ig constant regions might recapitulate substantially the full repertoire that is characteristic of the human humoral response to infection and immunization. The work of Green et al. was recently extended to the introduction of greater than approximately 80% of the human antibody repertoire through the use of megabase-sized, germline configuration YAC fragments of the human heavy chain loci and kappa light chain loci, respectively, to produce XenoMouse mice. See Mendez et al., 1997, Nature Genetics, 15:146-156; Green and Jakobovits, 1998, J. Exp. Med., 188:483-495; and Green, 1999, Journal of Immunological Methods, 231:11-23, the disclosures of which are hereby incorporated herein by reference.

[0188] Human anti-mouse antibody (HAMA) responses have led the industry to prepare chimeric or otherwise humanized antibodies. While chimeric antibodies typically are comprised of a human constant region and a murine variable region, it is expected that certain human anti-chimeric antibody (HACA) responses will be observed, particularly in treatments involving chronic or multi-dose utilizations of the antibody. Thus, it is desirable to provide fully human antibodies against protein tyrosine kinase biomarker polypeptides in order to vitiate concerns and/or effects of HAMA or HACA responses.

[0189] Antibodies of the invention can be chemically synthesized or produced through the use of recombinant expression systems. Accordingly, the invention further embraces polynucleotides comprising a nucleotide sequence encoding an antibody of the invention and fragments thereof. The invention also encompasses polynucleotides that hybridize under stringent or lower stringency hybridization conditions, e.g., as defined supra, to polynucleotides that encode an antibody, preferably, an antibody that specifically binds to a protein tyrosine kinase polypeptide of this invention, and more preferably, an antibody that binds to a polypeptide having the amino acid sequence of one or more of the protein tyrosine kinase biomarker sequences, e.g., Src tyrosine kinase biomarkers, as set forth in Table 2.

[0190] The polynucleotides may be obtained, and the nucleotide sequence of the polynucleotides determined, by any method known in the art. For example, if the nucleotide sequence of the antibody is known, a polynucleotide encoding the antibody can be assembled from chemically synthesized oligonucleotides (e.g., as described in Kutmeier et al., 1994, BioTechniques, 17:242), which, briefly, involves the synthesis of overlapping oligonucleotides containing portions of the sequence encoding the antibody, the annealing and ligating of those oligonucleotides, and then the amplification of the ligated oligonucleotides by PCR.

[0191] Alternatively, a polynucleotide encoding an antibody can be generated from nucleic acid from a suitable source. If a clone containing a nucleic acid encoding a particular antibody is not available, but the sequence of the antibody molecule is known, a nucleic acid encoding the immunoglobulin can be chemically synthesized or obtained from a suitable source (e.g., an antibody cDNA library, or a cDNA library generated from, (or a nucleic acid, preferably poly A+ RNA, isolated from), any tissue or cells expressing the antibody, such as hybridoma cells selected to express an antibody of the invention by PCR amplification using synthetic primers hybridizable to the 3′ and 5′ ends of the sequence. Alternatively, cloning using an oligonucleotide probe specific for the particular polynucleotide sequence to be identified, e.g., a cDNA clone from a cDNA library that encodes the desired antibody can be employed. Amplified nucleic acids generated by PCR can then be cloned into replicable cloning vectors using any method well known in the art.

[0192] Once the nucleotide sequence and corresponding encoded amino acid sequence of the antibody are determined, the nucleotide sequence of the antibody can be manipulated using methods well known in the art for the manipulation of nucleotide sequences, e.g., recombinant DNA techniques, site directed mutapolynucleotidesis, PCR, etc. (see, for example, the techniques described in Sambrook et al., 1990, Molecular Cloning, A Laboratory Manual, 2nd Ed., Cold Spring Harbor Laboratory, Cold Spring Harbor, N.Y.; and F. M. Ausubel et al., eds., 1998, Current Protocols in Molecular Biology, John Wiley & Sons, NY, which are both incorporated by reference herein in their entireties), to generate antibodies having a different amino acid sequence, for example, to create amino acid substitutions, deletions, and/or insertions.

[0193] In a specific embodiment, the amino acid sequence of the heavy and/or light chain variable domains can be inspected to identify the sequences of the CDRs by methods that are well known in the art, e.g., by comparison to known amino acid sequences of other heavy and light chain variable regions, to determine the regions of sequence hypervariability. Using routine recombinant DNA techniques, one or more of the CDRs can be inserted within framework regions, e.g., into human framework regions, to humanize a non-human antibody, as described supra. The framework regions can be naturally occurring or consensus framework regions, and preferably, are human framework regions (see, e.g., Chothia et al., 1998, J. Mol. Biol., 278:457-479, for a listing of human framework regions).

[0194] Preferably, the polynucleotide generated by the combination of the framework regions and CDRs encodes an antibody that specifically binds to a protein tyrosine kinase biomarker polypeptide of the invention. Also preferably, as discussed supra, one or more amino acid substitutions can be made within the framework regions; such amino acid substitutions are performed with the goal of improving binding of the antibody to its antigen, e.g., greater antibody binding affinity. In addition, such methods can be used to make amino acid substitutions or deletions of one or more variable region cysteine residues participating in an intrachain disulfide bond to generate antibody molecules lacking one or more intrachain disulfide bonds. Other alterations that can be made to the polynucleotide are encompassed by the present invention and are within the skill of the art.

[0195] For some uses, such as for in vitro affinity maturation of an antibody of the invention, it is useful to express the V_{H} and V_{L} domains of the heavy and light chains of one or more antibodies of the invention as single chain antibodies, or Fab fragments, in a phage display library using phage display methods as described supra. For example, the cDNAs encoding the V_{H} and V_{L} domains of one or more antibodies of the invention can be expressed in all possible combinations using a phage display library, thereby allowing for the selection of V_{H}/V_{L} combinations that bind to the protein tyrosine kinase biomarker polypeptides according to the present invention with preferred binding characteristics such as improved affinity or improved off rates. In addition, V_{H} and V_{L} segments, particularly, the CDR regions of the V_{H} and V_{L} domains of one or more antibodies of the invention, can be mutated in vitro. Expression of V_{H} and V_{L} domains with “mutant” CDRs in a phage display library allows for the selection of V_{H}/V_{L} combinations that bind to protein tyrosine kinase biomarkers, e.g., Src tyrosine kinase biomarker proteins, which are receptor polypeptides with preferred binding characteristics such as improved affinity or improved off rates.

[0196] Once an antibody molecule of the invention has been produced by an animal, chemically synthesized, or recombinantly expressed, it can be purified by any method known in the art for the purification of an immunoglobulin or polypeptide molecule, for example, by chromatography (e.g., ion exchange, affinity, particularly by affinity for the specific antigen, Protein A, and sizing column chromatography), centrifugation, differential solubility, or by any other standard technique for the purification of proteins. In addition, the antibodies of the present invention or fragments thereof can be fused to heterologous polypeptide sequences described herein or otherwise known in the art, to facilitate purification.

[0197] The present invention encompasses antibodies that are recombinantly fused or chemically conjugated (including both covalently and non-covalently conjugated) to a polypeptide (or portion thereof, preferably at least 10, 20, 30, 40, 50, 60, 70, 80, 90 or 100 amino acids of the polypeptide) of the present invention to generate fusion proteins. The fusion does not necessarily need to be direct, but can occur through linker sequences. The antibodies can be specific for antigens other than polypeptides (or portions thereof, preferably at least 10, 20, 30, 40, 50, 60, 70, 80, 90 or 100 amino acids of the polypeptide) of the present invention. For example, antibodies can be used to target the polypeptides of the present invention to particular cell types, either in vitro or in vivo, by fusing or conjugating the polypeptides of the present invention to antibodies specific for particular cell surface receptors.

[0198] The present invention further includes compositions comprising the protein tyrosine kinase biomarker polypeptides of the present invention fused or conjugated to antibody domains other than the variable region domain. For example, the polypeptides of the present invention can be fused or conjugated to an antibody Fc region, or portion thereof. The antibody portion fused to a polypeptide of the present invention can comprise the constant region, hinge region, CH1 domain, CH2 domain, CH3 domain, or any combination of whole domains or portions thereof. The polypeptides can also be fused or conjugated to the above antibody portions to form multimers. For example, Fc portions of immunoglobulin molecules fused to the polypeptides of the present invention can form dimers through disulfide bonding between the Fc portions. Higher multimeric forms can be made by fusing the polypeptides to portions of IgA and IgM. Methods for fusing or conjugating the polypeptides of the present invention to antibody portions are known in the art. (See, e.g., U.S. Pat. Nos. 5,336,603; 5,622,929; 5,359,046; 5,349,053; 5,447,851; 5,112,946; EP 307,434; EP 367,166; PCT publications WO 96/04388; WO 91/06570; Ashkenazi et al., 1991, Proc. Natl. Acad. Sci. USA, 88:10535-10539; Zheng et al., 1995, J. Immunol., 154:5590-5600; and Vil et al., Proc. Natl. Acad. Sci. USA, 89:11337-11341, which are hereby incorporated by reference herein in their entireties).

[0199] As discussed supra, the polypeptides corresponding to a polypeptide, polypeptide fragment, or a variant of one or more of the protein tyrosine kinase biomarker amino acid sequences as set forth in Table 2 can be fused or conjugated to the above antibody portions to increase the in vivo half life of the polypeptides, or for use in immunoassays using methods known in the art. Further, the polypeptides corresponding to one or more of the protein tyrosine kinase biomarker, e.g., src biomarker, sequences as set forth in Table 2 can be fused or conjugated to the above antibody portions to facilitate purification. For guidance, chimeric proteins having the first two domains of the human CD4 polypeptide and various domains of the constant regions of the heavy or light chains of mammalian immunoglobulins have been described. (EP 394,827; Traunecker et al., 1988, Nature, 331:84-86). The polypeptides of the present invention fused or conjugated to an antibody, or portion thereof, having disulfide-linked dimeric structures (due to the IgG), for example, can also be more efficient in binding and neutralizing other molecules than the monomeric secreted protein or protein fragment alone. (Fountoulakis et al., 1995, J. Biochem., 270:3958-3964). In many cases, the Fc portion in a fusion protein is beneficial in therapy, diagnosis, and/or screening methods, and thus can result in, for example, improved pharmacokinetic properties. (EP 232, 262 A). In drug discovery, for example, human proteins, such as huIL-5, have been fused with Fc portions for the purpose of high-throughput screening assays to identify antagonists of huIL-5. (See, Bennett et al., 1995, J. Molecular Recognition, 8:52-58; and Johanson et al., 1995, J. Biol. Chem., 270:9459-9471). Alternatively, deleting the Fc portion after the fusion protein has been expressed, detected, and purified may be desired. For example, the Fc portion may hinder therapy and diagnosis if the fusion protein is used as an antigen for immunizations.

[0200] Moreover, the antibodies or fragments thereof of the present invention can be fused to marker sequences, such as a peptide, to facilitate their purification. In preferred embodiments, the marker amino acid sequence is a hexa-histidine peptide, such as the tag provided in a pQE vector (QIAGEN, Inc., Chatsworth, Calif.), among others, many of which are commercially available. As described in Gentz et al., 1989, Proc. Natl. Acad. Sci. USA, 86:821-824, for instance, hexa-histidine provides for convenient purification of the fusion protein. Other peptide tags useful for purification include, but are not limited to, the “HA” tag, which corresponds to an epitope derived from the influenza hemagglutinin (HA) protein (Wilson et al., 1984, Cell, 37:767) and the “flag” tag.

[0201] The present invention further encompasses antibodies or fragments thereof conjugated to a diagnostic or therapeutic agent. The antibodies can be used diagnostically to, for example, monitor the development or progression of a tumor as part of a clinical testing procedure, for example, to determine the efficacy of a given treatment regimen. Detection can be facilitated by coupling the antibody to a detectable substance. Nonlimiting examples of detectable substances include various enzymes, prosthetic groups, fluorescent materials, luminescent materials, bioluminescent materials, radioactive materials, positron emitting metals using various positron emission tomographies, and nonradioactive paramagnetic metal ions. The detectable substance can be coupled or conjugated either directly to the antibody (or fragment thereof) or indirectly, through an intermediate (such as, for example, a linker known in the art) using techniques known in the art. (See, for example, U.S. Pat. No. 4,741,900 for metal ions which can be conjugated to antibodies for use as diagnostics according to the present invention).

[0202] Nonlimiting examples of suitable enzymes include horseradish peroxidase, alkaline phosphatase, beta-galactosidase, or acetylcholinesterase. Nonlimiting examples of suitable prosthetic group complexes include streptavidin/biotin and avidin/biotin; nonlimiting examples of suitable fluorescent materials include umbelliferone, fluorescein, fluorescein isothiocyanate, rhodamine, dichlorotriazinylamine fluorescein, dansyl chloride or phycoerythrin; a nonlimiting example of a luminescent material includes luminol; nonlimiting examples of bioluminescent materials include luciferase, luciferin, and aequorin; and nonlimiting examples of suitable radioactive material include iodine (¹²⁵I, ¹³¹I), carbon (¹⁴C), sulfur (3sus), tritium (³H), indium (¹¹¹In and other radioactive isotopes of inidium), technetium (⁹⁹Tc, ^{99m}Tc), thallium (20′Ti), gallium (⁶⁸Ga, ⁶⁷Ga), palladium (¹⁰³Pd), molybdenum (⁹⁹Mo), xenon (¹³³Xe), fluorine (¹⁹F), ¹⁵³Sm, ¹⁷⁷Lu, Gd, radioactive Pm, radioactive La, radioactive Yb, ¹⁶⁶Ho, ⁹⁰Y, radioactive Sc, radioactive Re, radioactive Re, ¹⁴²Pr, ¹⁰⁵Rh, and ⁹⁷Ru.

[0203] In specific embodiments, the protein tyrosine kinase biomarker polypeptides of the invention are attached to macrocyclic chelators useful for conjugating radiometal ions, including, but not limited to, ¹¹¹In, ¹⁷⁷Lu, ⁹⁰Y, ¹⁶⁶Ho, and ¹⁵³Sm, to polypeptides. In a preferred embodiment, the radiometal ion associated with the macrocyclic chelators attached to the protein tyrosine kinase biomarker polypeptides of the invention is ¹¹¹In. In another preferred embodiment, the radiometal ion associated with the macrocyclic chelator attached to the protein tyrosine kinase biomarker polypeptides of the invention is ⁹⁰Y. In specific embodiments, the macrocyclic chelator is 1,4,7,10-tetraazacyclododecane-N,N′,N″, N′″-tetraacetic acid (DOTA). In other specific embodiments, the DOTA is attached to the protein tyrosine kinase biomarker polypeptides of the invention via a linker molecule.

[0204] Examples of linker molecules useful for conjugating DOTA to a polypeptide are commonly known in the art. (See, for example, DeNardo et al., 1998, Clin. Cancer Res., 4(10):2483-90; Peterson et al., 1999, Bioconjug. Chem., 10(4):553-557; and Zimmerman et al, 1999, Nucl. Med. Biol., 26(8):943-950, which are hereby incorporated by reference in their entirety). In addition, U.S. Pat. Nos. 5,652,361 and 5,756,065, which disclose chelating agents that can be conjugated to antibodies and methods for making and using them, are hereby incorporated by reference in their entireties. Though U.S. Pat. Nos. 5,652,361 and 5,756,065 focus on conjugating chelating agents to antibodies, one skilled in the art can readily adapt the methods disclosed therein in order to conjugate chelating agents to other polypeptides.

[0205] Antibodies can also be attached to solid supports, which are particularly useful for immunoassays or purification of the target antigen. Such solid supports include, but are not limited to, glass, cellulose, polyacrylamide, nylon, polystyrene, polyvinyl chloride or polypropylene. Techniques for conjugating therapeutic moieties to antibodies are well known, see, e.g., Arnon et al., “Monoclonal Antibodies For Immunotargeting Of Drugs In Cancer Therapy”, In: Monoclonal Antibodies And Cancer Therapy, Reisfeld et al. (eds.), pp. 243-56, Alan R. Liss, Inc., 1985; Hellstrom et al., “Antibodies For Drug Delivery”, In: Controlled Drug Delivery (2nd Ed.), Robinson et al. (eds.), pp. 623-53, Marcel Deldcer, Inc., 1987; Thorpe, “Antibody Carriers Of Cytotoxic Agents In Cancer Therapy: A Review”, In: Monoclonal Antibodies '84: Biological And Clinical Applications, Pinchera et al. (eds.), pp. 475-506, 1985; “Analysis, Results, And Future Prospective Of The Therapeutic Use Of Radiolabeled Antibody In Cancer Therapy”, In: Monoclonal Antibodies For Cancer Detection And Therapy, Baldwin et al. (eds.), pp. 303-316, Academic Press, 1985; and Thorpe et al., 1982, “The Preparation And Cytotoxic Properties Of Antibody-Toxin Conjugates”, Immunol. Rev., 62:119-158. Alternatively, an antibody can be conjugated to a second antibody to form an antibody heteroconjugate, e.g., as described in U.S. Pat. No. 4,676,980 to Segal, which is incorporated herein by reference in its entirety. An antibody, i.e., an antibody specific for a protein tyrosine kinase biomarker polypeptide of this invention, with or without a therapeutic moiety conjugated to it, and administered alone or in combination with cytotoxic factor(s) and/or cytokine(s), can be used as a therapeutic.

[0206] The antibodies of the invention can further be utilized for immunophenotyping of cell lines and biological samples. The translation product of the protein tyrosine kinase biomarker-encoding polynucleotides of the present invention can be useful as cell specific marker(s), or more specifically, as cellular marker(s) that are differentially expressed at various stages of differentiation and/or maturation of particular cell types. Monoclonal antibodies directed against a specific epitope, or combination of epitopes, allow for the screening of cellular populations expressing the marker. Various techniques utilizing monoclonal antibodies can be employed to screen for cellular populations expressing the marker(s), including magnetic separation using antibody-coated magnetic beads, “panning” with antibody(ies) attached to a solid matrix (i.e., tissue culture plate), and flow cytometry (See, e.g., U.S. Pat. No. 5,985,660; Morrison et al., 1999, Cell, 96:737-749; and L. J. Wysocki and V. L. Sato, 1978, Proc. Natl. Acad. Sci. USA, 75(6):2844-8).

[0207] These techniques allow for the screening of particular populations of cells, such as might be found with hematological malignancies (i.e. minimal residual disease (MRD) in acute leukemic patients) and “non-self” cells in transplantations to prevent Graft-versus-Host Disease (GVHD). Alternatively, these techniques allow for the screening of hematopoietic stem and progenitor cells capable of undergoing proliferation and/or differentiation, as might be found in human umbilical cord blood.

[0208] Antibodies according to this invention can be assayed for immunospecific binding by any method known in the art. The immunoassays which can be used include, but are not limited to, competitive and non-competitive assay systems using techniques such as BIAcore analysis, FACS (Fluorescence Activated Cell Sorter) analysis, immunofluorescence, immunocytochemistry, Western blots, radioimmunoassays, ELISA (enzyme linked immunosorbent assays), “sandwich” immunoassays, immunoprecipitation assays, precipitin reactions, gel diffusion precipitin reactions, immunodiffusion assays, agglutination assays, complement fixation assays, immunoradiometric assays, fluorescent immunoassays, protein A immunoassays, to name but a few. Such assays are routine and well known and practiced in the art (see, e.g., Ausubel et al, eds, 1994, Current Protocols in Molecular Biology, Vol. 1, John Wiley & Sons, Inc., New York, which is incorporated by reference herein in its entirety). Nonlimiting, exemplary immunoassays are described briefly below.

[0209] Immunoprecipitation protocols generally comprise lysing a population of cells in a lysis buffer such as RIPA buffer (i.e., 1% NP-40 or Triton X-100, 1% sodium deoxycholate, 0.1% SDS, 0.15 M NaCl, 0.01 M sodium phosphate at pH 7.2, 1% Trasylol) supplemented with protein phosphatase and/or protease inhibitors (e.g., EDTA, PMSF, aprotinin, sodium vanadate); adding the antibody of interest to the cell lysate; incubating for a period of time (e.g., 1 to 4 hours) at 4° C.; adding protein A and/or protein G sepharose beads to the cell lysate; incubating for about 60 minutes or more at 4° C.; washing the beads in lysis buffer; and resuspending the beads in SDS/sample buffer. The ability of the antibody of interest to immunoprecipitate a particular antigen can be assessed by, for example, Western blot analysis. One of skill in the art would be knowledgeable as to the parameters that can be modified to increase the binding of the antibody to an antigen and decrease the background (e.g., pre-clearing the cell lysate with sepharose beads). For further discussion regarding immunoprecipitation protocols, see, e.g., Ausubel et al, eds, 1994, Current Protocols in Molecular Biology, Vol. 1, John Wiley & Sons, Inc., New York, at 10.16.1.

[0210] Western blot analysis generally comprises preparing protein samples; electrophoresis of the protein samples in a polyacrylamide gel (e.g., 8%-20% SDS PAGE depending on the molecular weight of the antigen); transferring the protein sample from the polyacrylamide gel to a membrane such as nitrocellulose, PVDF or nylon; blocking the membrane in blocking solution (e.g., PBS with 3% BSA or nonfat milk); washing the membrane in washing buffer (e.g., PBS-Tween 20); blocking the membrane with primary antibody (the antibody of interest) diluted in blocking buffer; washing the membrane in washing buffer; blocking the membrane with a secondary antibody (which recognizes the primary antibody, e.g., an anti-human antibody) conjugated to an enzymatic substrate (e.g., horseradish peroxidase or alkaline phosphatase) or radioactive molecule (e.g., ³²P or ¹²⁵I) diluted in blocking buffer; washing the membrane in wash buffer; and detecting the presence of the bound antigen. One of skill in the art would be knowledgeable as to the parameters that can be modified to increase the signal detected and to reduce the background noise. For further discussion regarding Western blot protocols, see, e.g., Ausubel et al, eds, 1994, Current Protocols in Molecular Biology, Vol. 1, John Wiley & Sons, Inc., New York, at 10.8.1.

[0211] ELISAs comprise preparing antigen; coating the wells of a 96 well microtiter plate with antigen; adding to the wells the antibody of interest conjugated to a detectable compound such as an enzymatic substrate (e.g., horseradish peroxidase or alkaline phosphatase); incubating for a period of time; and detecting the presence of the antigen. In ELISAs, the antibody of interest does not have to be conjugated to a detectable compound; instead, a second antibody (which recognizes the antibody of interest bound to antigen) conjugated to a detectable compound can be added to the wells. Further, instead of coating the wells with antigen, the antibodies can be first coated onto the well. In this case, a second antibody conjugated to a detectable compound can be added to the antibody-coated wells following the addition of the antigen of interest. One of skill in the art would be knowledgeable as to the parameters that can be modified to increase the signal detected, as well as other variations of ELISAs known in the art. For further discussion regarding ELISAs, see, e.g., Ausubel et al, eds, 1994, Current Protocols in Molecular Biology, Vol. 1, John Wiley & Sons, Inc., New York, at 11.2.1.

[0212] The binding affinity of an antibody to an antigen and the off-rate of an antibody-antigen interaction can be determined by competitive binding assays. One example of a competitive binding assay is a radioimmunoassay involving the incubation of labeled antigen (e.g., ³H or ¹²⁵I, or a fragment or variant thereof, with the antibody of interest in the presence of increasing amounts of labeled antigen, and the detection of the antibody bound to the labeled antigen. The affinity of the antibody of interest for a protein tyrosine kinase biomarker and the binding off rates can be determined from the data by Scatchard plot analysis. Competition with a second antibody can also be determined using radioimmunoassays. In this case, the tyrosine kinase biomarker protein is incubated with an antibody of interest conjugated to a labeled compound (e.g., a compound labeled with ³H or ¹²⁵I) in the presence of increasing amounts of an unlabeled second antibody. This kind of competitive assay between two antibodies can also be used to determine if two antibodies bind to the same or different epitopes on an antigen.

[0213] In a preferred embodiment, BIAcore kinetic analysis is used to determine the binding on and off rates of antibodies (including antibody fragments or variants thereof) to a tyrosine kinase biomarker protein, or fragments of a tyrosine kinase biomarker protein. Kinetic analysis comprises analyzing the binding and dissociation of antibodies from chips with immobilized tyrosine kinase biomarker protein on the chip surface.

[0214] It is to be further understood that the above-described techniques for the production, expression, isolation, and manipulation of antibody molecules, for example, by recombinant techniques involving molecular biology, as well as by other techniques related to the analysis of polynucleotides and proteins, are applicable to other polypeptide or peptide molecules of the invention as described herein, in particular, the tyrosine kinase biomarker polypeptides or peptides themselves, as applicable or warranted, in accordance with the various embodiments of this invention.

[0215] The present invention also embraces a kit for determining, predicting, or prognosing drug susceptibility or resistance by a patient having a disease, particularly a cancer or tumor, preferably, a lung cancer or tumor. Such kits are useful in a clinical setting for use in testing patient's biopsied tumor or cancer samples, for example, to determine or predict if the patient's tumor or cancer will be resistant or sensitive to a given treatment or therapy with a drug, compound, chemotherapy agent, or biological treatment agent. Provided in the kit are the predictor set comprising those polynucleotides correlating with resistance and sensitivity to protein tyrosine kinase modulators in a particular biological system, particularly protein tyrosine kinase inhibitors, and preferably comprising a microarray; and, in suitable containers, the modulator compounds for use in testing cells from patient tissue or patient samples for resistance/sensitivity; and instructions for use. Such kits encompass predictor set comprising those polynucleotides correlating with resistance and sensitivity to modulators of protein tyrosine kinases including members of the Src family of tyrosine kinases, for example, Src, Fgr, Fyn, Yes, Blk, Hck, Lck and Lyn, as well as other protein tyrosine kinases, including, Bcr-abl, Jak, PDGFR, c-kit and Eph receptors,

[0216] Also, as explained above, the kit is not limited to microarrays, but can encompass a variety of methods and systems by which the expression of the predictor/marker polynucleotides can be assayed and/or monitored, both at the level of mRNA and of protein, for example, via PCR assays, e.g., RT-PCR and immunoassay, such as IHC, ELISA. In kits for performing PCR, or in situ hybridization, for example, nucleic acid primers or probes from the sequences of one or more of the predictor polynucleotides, such as those described herein, in addition to buffers and reagents as necessary for performing the method, and instructions for use. In kits for performing immunoassays, e.g. ELISAs, immunoblotting assays, and the like, antibodies, or bindable portions thereof, to the protein tyrosine kinase biomarker polypeptides of the invention, or to antigenic or immunogenic peptides thereof, are supplied, in addition to buffers and reagents as necessary for performing the method, and instructions for use. The kits according to the present invention can also comprise predictor polynucleotides as set forth in Table 2, and/or one or more of the specific predictor polynucleotide subsets as presented in Tables 4-5 herein.

[0217] In another embodiment, the present invention embraces the use of one or more polynucleotides among those of the predictor polynucleotides identified herein that can serve as targets for the development of drug therapies for disease treatment. Such targets may be particularly applicable to treatment of lung diseases, such as lung cancers or tumors. Indeed, because these predictor polynucleotides are differently expressed in sensitive and resistant, cells, their expression pattern is correlated with relative intrinsic sensitivity of cells to treatment with compounds that interact with and inhibit protein tyrosine kinases. Accordingly, the polynucleotides highly expressed in resistant cells can serve as targets for the development of drug therapies for the tumors which are resistant to protein tyrosine kinase inhibitor compounds, for example, Src tyrosine kinase inhibitors.

[0218] In another embodiment, the present invention embraces antisense and/or siRNAi reagents as specific modulators of the predictor polynucleotides of the present invention. In specific embodiments, antagonists according to the present invention are nucleic acids corresponding to the sequences contained in one or more of the sequences provided as SEQ ID NO:1 thru 129, or the complementary strand thereof. In one embodiment, antisense sequence is generated internally by the organism, in another embodiment, the antisense sequence is separately administered (see, for example, O'Connor, Neurochem., 56:560 (1991). Oligodeoxynucleotides as Antisense Inhibitors of Gene Expression, CRC Press, Boca Raton, Fla. (1988). Antisense technology can be used to control gene expression through antisense DNA or RNA, or through triple-helix formation. Antisense techniques are discussed for example, in Okano, Neurochem., 56:560 (1991); Oligodeoxynucleotides as Antisense Inhibitors of Gene Expression, CRC Press, Boca Raton, Fla. (1988). Triple helix formation is discussed in, for instance, Lee et al., Nucleic Acids Research, 6:3073 (1979); Cooney et al., Science, 241:456 (1988); and Dervan et al., Science, 251:1300 (1991). The methods are based on binding of a polynucleotide to a complementary DNA or RNA.

[0219] For example, the use of c-myc and c-myb antisense RNA constructs to inhibit the growth of the non-lymphocytic leukemia cell line HL-60 and other cell lines was previously described. (Wickstrom et al. (1988); Anfossi et al. (1989)). These experiments were performed in vitro by incubating cells with the oligoribonucleotide. A similar procedure for in vivo use is described in WO 91/15580. Briefly, a pair of oligonucleotides for a given antisense RNA is produced as follows: A sequence complimentary to the first 15 bases of the open reading frame is flanked by an EcoR1 site on the 5 end and a HindIII site on the 3 end. Next, the pair of oligonucleotides is heated at 90° C. for one minute and then annealed in 2× ligation buffer (20 mM TRIS HCl pH 7.5, 10 mM MgCl2, 10 MM dithiothreitol (DTT) and 0.2 mM ATP) and then ligated to the EcoR1/Hind III site of the retroviral vector PMV7 (WO 91/15580).

[0220] For example, the 5′ coding portion of a polynucleotide that encodes the mature polypeptide of the present invention may be used to design an antisense RNA oligonucleotide of from about 10 to 40 base pairs in length. A DNA oligonucleotide is designed to be complementary to a region of the gene involved in transcription thereby preventing transcription and the production of the receptor. The antisense RNA oligonucleotide hybridizes to the mRNA in vivo and blocks translation of the mRNA molecule into receptor polypeptide. Antisense oligonucleotides may be single or double stranded. Double stranded RNA's may be designed based upon the teachings of Paddison et al., Proc. Nat. Acad. Sci., 99:1443-1448 (2002); and International Publication Nos. WO 01/29058, and WO 99/32619; which are hereby incorporated herein by reference.

[0221] In one embodiment, the antisense nucleic acid of the invention is produced intracellularly by transcription from an exogenous sequence. For example, a vector or a portion thereof, is transcribed, producing an antisense nucleic acid (RNA) of the invention. Such a vector would contain a sequence encoding the antisense nucleic acid of the invention. Such a vector can remain episomal or become chromosomally integrated, as long as it can be transcribed to produce the desired antisense RNA. Such vectors can be constructed by recombinant DNA technology methods standard in the art. Vectors can be plasmid, viral, or others known in the art, used for replication and expression in vertebrate cells. Expression of the sequence encoding a polypeptide of the invention, or fragments thereof, can be by any promoter known in the art to act in vertebrate, preferably human cells. Such promoters can be inducible or constitutive. Such promoters include, but are not limited to, the SV40 early promoter region (Bernoist and Chambon, Nature, 29:304-310 (1981), the promoter contained in the 3′ long terminal repeat of Rous sarcoma virus (Yamamoto et al., Cell, 22:787-797 (1980), the herpes thymidine promoter (Wagner et al., Proc. Natl. Acad. Sci. U.S.A., 78:1441-1445 (1981), the regulatory sequences of the metallothionein gene (Brinster et al., Nature, 296:39-42 (1982)), etc.

[0222] The antisense nucleic acids of the invention comprise a sequence complementary to at least a portion of an RNA transcript of a gene of interest. However, absolute complementarity, although preferred, is not required. A sequence “complementary to at least a portion of an RNA” referred to herein, means a sequence having sufficient complementarity to be able to hybridize with the RNA, forming a stable duplex; in the case of double stranded antisense nucleic acids of the invention, a single strand of the duplex DNA may thus be tested, or triplex formation may be assayed. The ability to hybridize will depend on both the degree of complementarity and the length of the antisense nucleic acid Generally, the larger the hybridizing nucleic acid, the more base mismatches with a RNA sequence of the invention it may contain and still form a stable duplex (or triplex as the case may be). One skilled in the art can ascertain a tolerable degree of mismatch by use of standard procedures to determine the melting point of the hybridized complex.

[0223] Oligonucleotides that are complementary to the 5′ end of the message, e.g., the 5′ untranslated sequence up to and including the AUG initiation codon, should work most efficiently at inhibiting translation. However, sequences complementary to the 3′ untranslated sequences of mRNAs have been shown to be effective at inhibiting translation of mRNAs as well. See generally, Wagner, R., Nature, 372:333-335 (1994). Thus, oligonucleotides complementary to either the 5′- or 3′-non-translated, non-coding regions of a polynucleotide sequence of the invention could be used in an antisense approach to inhibit translation of endogenous mRNA. Oligonucleotides complementary to the 5′ untranslated region of the mRNA should include the complement of the AUG start codon. Antisense oligonucleotides complementary to mRNA coding regions are less efficient inhibitors of translation but could be used in accordance with the invention. Whether designed to hybridize to the 5′-, 3′- or coding region of mRNA, antisense nucleic acids should be at least six nucleotides in length, and are preferably oligonucleotides ranging from 6 to about 50 nucleotides in length. In specific aspects the oligonucleotide is at least 10 nucleotides, at least 17 nucleotides, at least 25 nucleotides or at least 50 nucleotides.

[0224] The polynucleotides of the invention can be DNA or RNA or chimeric mixtures or derivatives or modified versions thereof, single-stranded or double-stranded. The oligonucleotide can be modified at the base moiety, sugar moiety, or phosphate backbone, for example, to improve stability of the molecule, hybridization, etc. The oligonucleotide may include other appended groups such as peptides (e.g., for targeting host cell receptors in vivo), or agents facilitating transport across the cell membrane (see, e.g., Letsinger et al., Proc. Natl. Acad. Sci. U.S.A. 86:6553-6556 (1989); Lemaitre et al., Proc. Natl. Acad. Sci., 84:648-652 (1987); PCT Publication NO: WO88/09810, published Dec. 15, 1988) or the blood-brain barrier (see, e.g., PCT Publication NO: WO89/10134, published Apr. 25, 1988), hybridization-triggered cleavage agents. (See, e.g., Krol et al., BioTechniques, 6:958-976 (1988)) or intercalating agents. (See, e.g., Zon, Pharm. Res., 5:539-549 (1988)). To this end, the oligonucleotide may be conjugated to another molecule, e.g., a peptide, hybridization triggered cross-linking agent, transport agent, hybridization-triggered cleavage agent, etc.

[0225] Double stranded RNA's may be designed based upon the teachings of Paddison et al., Proc. Nat. Acad. Sci., 99:1443-1448 (2002); and International Publication Nos. WO 01/29058, and WO 99/32619; which are hereby incorporated herein by reference.

[0226] SiRNA reagents are specifically contemplated by the present invention. Such reagents are useful for inhibiting expression of the polynucleotides of the present invention and may have therapeutic efficacy. Several methods are known in the art for the therapeutic treatment of disorders by the administration of siRNA reagents. One such method is described by Tiscornia et al (PNAS, 100(4):1844-1848 (2003)), which is incorporated by reference herein in its entirety.

[0227] The antisense oligonucleotide may comprise at least one modified base moiety which is selected from the group including, but not limited to, 5-fluorouracil, 5-bromouracil, 5-chlorouracil, 5-iodouracil, hypoxanthine, xanthine, 4-acetylcytosine, 5-(carboxyhydroxylmethyl) uracil, 5-carboxymethylaminomethyl-2-thiouridine, 5-carboxymethylaminomethyluracil, dihydrouracil, beta-D-galactosylqueosine, inosine, N6-isopentenyladenine, 1-methylguanine, 1-methylinosine, 2,2-dimethylguanine, 2-methyladenine, 2-methylguanine, 3-methylcytosine, 5-methylcytosine, N6-adenine, 7-methylguanine, 5-methylaminomethyluracil, 5-methoxyaminomethyl-2-thiouracil, beta-D-mannosylqueosine, 5′-methoxycarboxymethyluracil, 5-methoxyuracil, 2-methylthio-N-6-isopentenyladenine, uracil-5-oxyacetic acid (v), wybutoxosine, pseudouracil, queosine, 2-thiocytosine, 5-methyl-2-thiouracil, 2-thiouracil, 4-thiouracil, 5-methyluracil, uracil-5-oxyacetic acid methylester, uracil-5-oxyacetic acid (v), 5-methyl-2-thiouracil, 3-(3-amino-3-N-2-carboxypropyl) uracil, (acp3)w, and 2,6-diaminopurine.

[0228] The antisense oligonucleotide may also comprise at least one modified sugar moiety selected from the group including, but not limited to, arabinose, 2-fluoroarabinose, xylulose, and hexose.

[0229] In yet another embodiment, the antisense oligonucleotide comprises at least one modified phosphate backbone selected from the group including, but not limited to, a phosphorothioate, a phosphorodithioate, a phosphoramidothioate, a phosphoramidate, a phosphordiamidate, a methylphosphonate, an alkyl phosphotriester, and a formacetal or analog thereof.

[0230] In yet another embodiment, the antisense oligonucleotide is an a-anomeric oligonucleotide. An a-anomeric oligonucleotide forms specific double-stranded hybrids with complementary RNA in which, contrary to the usual b-units, the strands run parallel to each other (Gautier et al., Nucl. Acids Res., 15:6625-6641 (1987)). The oligonucleotide is a 2-0-methylribonucleotide (Inoue et al., Nucl. Acids Res., 15:6131-6148 (1987)), or a chimeric RNA-DNA analogue (Inoue et al., FEBS Lett. 215:327-330 (1987)).

[0231] Polynucleotides of the invention may be synthesized by standard methods known in the art, e.g. by use of an automated DNA synthesizer (such as are commercially available from Biosearch, Applied Biosystems, etc.). As examples, phosphorothioate oligonucleotides may be synthesized by the method of Stein et al. (Nucl. Acids Res., 16:3209 (1988)), methylphosphonate oligonucleotides can be prepared by use of controlled pore glass polymer supports (Sarin et al., Proc. Natl. Acad. Sci. U.S.A., 85:7448-7451 (1988)), etc.

[0232] While antisense nucleotides complementary to the coding region sequence of the invention could be used, those complementary to the transcribed untranslated region are most preferred.

[0233] Potential antagonists according to the invention also include catalytic RNA, or a ribozyme (See, e.g., PCT International Publication WO 90/11364, published Oct. 4, 1990; Sarver et al, Science, 247:1222-1225 (1990). While ribozymes that cleave mRNA at site specific recognition sequences can be used to destroy mRNAs corresponding to the polynucleotides of the invention, the use of hammerhead ribozymes is preferred. Hammerhead ribozymes cleave mRNAs at locations dictated by flanking regions that form complementary base pairs with the target mRNA. The sole requirement is that the target mRNA have the following sequence of two bases: 5′-UG-3′. The construction and production of hammerhead ribozymes is well known in the art and is described more fully in Haseloff and Gerlach, Nature, 334:585-591 (1988). There are numerous potential hammerhead ribozyme cleavage sites within each nucleotide sequence disclosed in the sequence listing. Preferably, the ribozyme is engineered so that the cleavage recognition site is located near the 5′ end of the mRNA corresponding to the polynucleotides of the invention; i.e., to increase efficiency and minimize the intracellular accumulation of non-functional mRNA transcripts.

[0234] As in the antisense approach, the ribozymes of the invention can be composed of modified oligonucleotides (e.g. for improved stability, targeting, etc.) and should be delivered to cells which express the polynucleotides of the invention in vivo. DNA constructs encoding the ribozyme may be introduced into the cell in the same manner as described above for the introduction of antisense encoding DNA. A preferred method of delivery involves using a DNA construct “encoding” the ribozyme under the control of a strong constitutive promoter, such as, for example, pol III or pol II promoter, so that transfected cells will produce sufficient quantities of the ribozyme to destroy endogenous messages and inhibit translation. Since ribozymes unlike antisense molecules, are catalytic, a lower intracellular concentration is required for efficiency.

[0235] Antagonist/agonist compounds may be employed to inhibit the cell growth and proliferation effects of the polypeptides of the present invention on neoplastic cells and tissues, i.e. stimulation of angiogenesis of tumors, and, therefore, retard or prevent abnormal cellular growth and proliferation, for example, in tumor formation or growth.

[0236] The antagonist/agonist may also be employed to prevent hyper-vascular diseases, and prevent the proliferation of epithelial lens cells after extracapsular cataract surgery. Prevention of the mitogenic activity of the polypeptides of the present invention may also be desirous in cases such as restenosis after balloon angioplasty.

[0237] The antagonist/agonist may also be employed to prevent the growth of scar tissue during wound healing.

[0238] The antagonist/agonist may also be employed to treat, prevent, and/or diagnose the diseases described herein.

[0239] Thus, the invention provides a method of treating or preventing diseases, disorders, and/or conditions, including but not limited to the diseases, disorders, and/or conditions listed throughout this application, associated with overexpression of a polynucleotide of the present invention by administering to a patient (a) an antisense molecule directed to the polynucleotide of the present invention, and/or (b) a ribozyme directed to the polynucleotide of the present invention.

[0240] It will be clear that the invention may be practiced otherwise than as particularly described in the foregoing description and examples. Numerous modifications and variations of the present invention are possible in light of the above teachings and, therefore, are within the scope of the appended claims.

[0241] The entire disclosure of each document cited (including patents, patent applications, journal articles, abstracts, laboratory manuals, books, Genbank Accession numbers, SWISS-PROT Accession numbers, or other disclosures) in the Background of the Invention, Detailed Description, Brief Description of the Figures, and Examples is hereby incorporated herein by reference in their entirety. Further, the hard copy of the Sequence Listing submitted herewith, in addition to its corresponding Computer Readable Form, are incorporated herein by reference in their entireties.

### EXAMPLES

[0242] The Examples herein are meant to exemplify the various aspects of carrying out the invention and are not intended to limit the scope of the invention in any way. The Examples do not include detailed descriptions for conventional methods employed, such as in the construction of vectors, the insertion of cDNA into such vectors, or the introduction of the resulting vectors into the appropriate host. Such methods are well known to those skilled in the art and are described in numerous publications, for example, Sambrook, Fritsch, and Maniatis, Molecular Cloning: A Laboratory Manual, 2^{nd} Edition, Cold Spring Harbor Laboratory Press, USA, (1989).

### Example 1

### Methods

IC₅₀ Determination—In Vitro Cytotoxicity Assay

[0243] The protein tyrosine kinase inhibitor compound (described in international application WO 00/62778, published Oct. 26, 2000) was tested for cytotoxicity in vitro against a panel of twenty-three human lung cell lines available from the American Type Culture Collection, ATCC. Cytotoxicity was assessed in cells by the MTS (3-(4,5-dimethylthiazol-2-yl)-5-(3-carboxy-methoxyphenyl)-2-(4-sulphenyl)-2H-tetrazolium, inner salt) assay (T. L. Riss et al., 1992, Mol. Biol. Cell, 3 (Suppl.): 184a).

[0244] To carry out the assays, the lung cells were plated at 4,000 cells/well in 96 well microtiter plates, and 24 hours later, serially diluted drugs were added. The concentration range for the protein tyrosine kinase inhibitor compound BMS-A used in the cytotoxicity assay was from 5 μg/ml to 0.0016 μg/ml (roughly 10 μM to 0.0032 μM).

[0245] The cells were incubated at 37° C. for 72 hours at which time the tetrazolium dye, MTS (333 μg/ml final concentration), in combination with the electron coupling agent phenazine methosulfate (25 μM final concentration), was added. A dehydrogenase enzyme in live cells reduces the MTS to a form that absorbs light and can be quantified spectrophotometrically at 492 nM. The greater the absorbency the greater the number of live cells. The results are expressed as an IC₅₀, which is the drug concentration required to inhibit cell proliferation (i.e. absorbance at 492 nM) to 50% of that of untreated control cells. The mean IC₅₀ and standard deviation (SD) from multiple tests for each cell line were calculated.

### Resistant/Sensitivity Classification

[0246] The mean IC₅₀ of the BMS-A protein tyrosine kinase inhibitor compound across the 23 human lund cell lines was calculated. The resistance/sensitivity phenotype of the cell lines was classified as follows: the cell lines with IC₅₀ below the mean IC₅₀ of all 23 cell lines were defined as sensitive to the compound, while those with IC₅₀ above the mean IC₅₀ were considered to be resistant to the compound. The resistance/sensitivity classification is shown in Table 1 and 11 cell lines classified as sensitive and 12 cell lines classified as resistant to the protein tyrosine kinase inhibitor compound BMS-A.

### Polynucleotide Expression Profiling

[0247] The lung cells were grown under standard cell culture conditions: RPMI 1640 supplemented to contain 10% fetal bovine serum, 100 IU/ml penicillin, 100 mg/ml streptomycin, 2 mM L-glutamine and 10 mM Hepes (all from GibcoBRL, Rockville, Md.). RNA was isolated from the cultured cells, either treated or untreated with drug (i.e., the protein tyrosine kinase inhibitor compound) at 50-70% confluence using the RNeasy™ kits commercially available from Qiagen, Valencia, Calif. The quality of the RNA was assessed by measuring the 28s:18s ribosomal RNA ratio using an Agilent 2100 bioanalyzer (Agilent Technologies, Rockville, Md.). The concentration of total RNA was determined spectrophotometrically. 10 μg of total RNA from each cell line was used to prepare biotinylated probe according to the Affymetrix Genechip® Expression Analysis Technical Manual, 2001. Targets were hybridized to Affymetrix high density oligonucleotide array human HG-U133 set chips (Affymetrix, Santa Clara, Calif.). The arrays were then washed and stained using the GeneChip® Fluidics station according to the manufacture's instructions (Affymetrix Genechip® Technical Manual, 2001). The HG-U133 set contains 2 Genechip® arrays, which contain approximately 45,000 probe sets representing more than 39,000 transcripts derived from approximately 33,000 well-substantiated human polynucleotides.

### Preprocessing of Microarray Data

[0248] Scanned image files were visually inspected for artifacts and analyzed with GeneChip® Expression Analysis software MAS 5.0 (Affymetrix, Santa Clara, Calif.). The “Detection Call” (Affymetrix Genechip® Expression Analysis Technical Manual, 2001) is used to determine whether a transcript is detected within one sample; the “Signal” (Affymetrix Genechip® Expression Analysis Technical Manual, 2001) measures the relative abundance of a transcript. The trimmed mean intensity for 100 normalization genes on each chip was scaled to 24,000 (see, Affymetrix Genechip® Expression Analysis Technical Manual, 2001) in order to account for any minor differences in global chip intensity, so that the overall expression level for each cell line was comparable. Affymetrix control sequences were removed prior to analysis.

[0249] Of a total of 44,792 probe sets on the HG-U133 arrays, 14,426 represented probe sets were not detected (Absent Call; p-value>0.06) across all of the 23 lung cell lines using the Affymetrix GeneChip® Expression Analysis algorithm; these undetected polynucleotides were excluded from further analysis.

[0250] The remaining data containing 30,366 probe sets were transferred to the GeneCluster software (Whitehead Institute; T. R. Golub et al., 1999, Science, 286:531-537). A threshold filter was applied to the polynucleotide expression values of the remaining data to remove low and high polynucleotide expression values that were not likely to be in the linear range of the Affymetrix fluorescent scanner. The threshold filter converted all polynucleotide expression values that were below 100 units to 100 units, and all polynucleotide expression values that were above 45,000 units to 45,000 units. All represented polynucleotides whose polynucleotide expression values were between 100 and 45,000 were not changed.

[0251] A second “variation filter” was then applied to the data set to find polynucleotides that were likely to correlate with different properties and features of the 23 cell lines. The object of the second filter was to select those polynucleotides whose expression pattern varied across the data set, because a polynucleotide that does not vary can not provide information about differing properties of the 23 cell line panel. For example, if there are two populations of cells within the data set, e.g., fast growing cells and slow growing cells, then a polynucleotide whose expression is constant, or whose expression does not change substantially, can not yield information that would correlate to fast or slow cell growth.

[0252] The second variation filter was formulated to determine the expression pattern of each polynucleotide across the 23 lung cell lines and to find polynucleotides that passed the following criteria:

[0253] 1. The polynucleotide must show a three-fold change in absolute expression, i.e., as depicted in the formula:

$$\frac{expression value in any given cell line}{expression value in any other cell line} > 3 or < 0.33$$

[0254] 2. In addition to 1, the three-fold change must represent an absolute difference of 1000 expression units.

[0255] 3. In addition, the criteria in #1 and #2 above must be met on four independent occasions within the data set, i.e., Cell line A/B, Cell line E/F, Cell line C/U and Cell line T/G. (The algorithm does not use a single expression value for one cell line on multiple occasions, i.e., Cell Line A/B, Cell line A/G, Cell line A/F and Cell line B/F).

[0256] The second variation filter reduced the data set to 4,797 polynucleotides. After the second variation filter, the expression value for each polynucleotide was log transformed and normalized to the mean across all of the 23 samples (mean set to 0 and standard deviation set to 1). This normalized data set was used to select polynucleotides which significantly correlated with the property of sensitivity toward a drug class as described herein.

### Drug (BMS-A) Treatment of Lung Cell Lines and Selection of Polynucleotides Modified by the Drug

[0257] A549 cells were seeded in a 10 cm² culture plate in cell culture medium as described herein and were cultured for 24 hours at 37° C. The medium was then changed to medium containing drug (0.4 μM BMS-A compound in 0.1% DMSO, Sigma); the cells were incubated for 4 hour or 24 hours, and then lysed for RNA isolation. The expression profiling was performed as described above and data were analyzed using GeneChip® Expression Analysis software MAS 5.0 (Affymetrix, Santa Clara, Calif.). The expression data of a drug treated cell line was compared pair-wise to data from the same cell line untreated with drug. A change in p-value was calculated, indicating an increase, decrease or no change in polynucleotide expression. When the p-value was less than 0.0025, the change was considered to be significant. This analysis was performed for duplicated experiments

### Example 2

### PCR Expression Profiling

[0258] RNA quantification is performed using the Taqman® real-time-PCR fluorogenic assay. The Taqman® assay is one of the most precise methods for assaying the concentration of nucleic acid templates.

[0259] RNA is prepared using standard methods, preferably, employing the RNeasy Maxi Kit commercially available from Qiagen (Valencia, Calif.). A cDNA template for real-time PCR can be generated using the Superscript™ First Strand Synthesis system for RT-PCR. Representative forward and reverse RT-PCT primers for each of the protein tyrosine kinase biomarker polynucleotides of the present invention are provided in Table 6.

[0260] SYBR Green real-time PCR reactions are prepared as follows: The reaction mix contains 20 ng first strand cDNA; 50 nM Forward Primer; 50 nM Reverse Primer; 0.75×SYBR Green I (Sigma); 1×SYBR Green PCR Buffer (50 mM Tris-HCl pH 8.3, 75 mM KCl); 10% DMSO; 3 mM MgCl₂; 300 μM each dATP, dGTP, dTTP, dCTP; 1 U Platinum® Taq DNA Polymerase High Fidelity (Cat# 11304-029; Life Technologies; Rockville, Md.). Real-time PCR is performed using an Applied Biosystems 5700 Sequence Detection System. Conditions are 95° C. for 10 minutes (denaturation and activation of Platinum® Taq DNA Polymerase), 40 cycles of PCR (95° C. for 15 seconds, 60° C. for 1 minute). PCR products are analyzed for uniform melting using an analysis algorithm built into the 5700 Sequence Detection System.

[0261] cDNA quantification used in the normalization of template quantity is performed using Taqman® technology. Taqman® reactions are prepared as follows: The reaction mix comprises 20 ng first strand cDNA; 25 nM GAPDH-F3, Forward Primer; 250 nM GAPDH-R1 Reverse Primer; 200 nM GAPDH-PVIC Taqman® Probe (fluorescent dye labeled oligonucleotide primer); 1× Buffer A (Applied Biosystems); 5.5 mM MgCl₂; 300 μM dATP, dGTP, dTTP, dCTP; and 1 U Amplitaq Gold (Applied Biosystems). GAPDH (D-glyceraldehyde-3-phosphate dehydrogenase) is used as a control to normalize mRNA levels. Real-time Taqman® PCR is performed using an Applied Biosystems 7700 Sequence Detection System. Conditions are 95° C. for 10 minutes (denaturation and activation of Amplitaq Gold), 40 cycles of PCR (95° C. for 15 seconds, 60° C. for 1 minute).

[0262] The sequences for the GAPDH oligonucleotides used in the Taqman® reactions are as follows:

(SEQ ID NO:501)

GAPDH-F3: 5′-AGCCGAGCCACATCGCT-3′;

(SEQ ID NO:502)

GAPDH-R1: 5′-GTGACCAGGCGCCCAATAC-3′;
and

(SEQ ID NO:503)

GAPDH-PVIC Taqman ® Probe -VIC-5′-CAAATCCGTTGACTCC
GACCTTCACCTT-3′ TAMRA.

[0263] The Sequence Detection System generates a Ct (threshold cycle) value that is used to calculate a concentration for each input cDNA template. cDNA levels for each polynucleotide of interest are normalized to GAPDH cDNA levels to compensate for variations in total cDNA quantity in the input sample. This is done by generating GAPDH Ct values for each cell line. Ct values for the polynucleotide of interest and GAPDH are inserted into a modified version of the δδCt equation (Applied Biosystems Prism® 7700 Sequence Detection System User Bulletin #2), which is used to calculate a GAPDH normalized relative cDNA level for each specific cDNA. The δδCt equation is as follows: relative quantity of nucleic acid template=2^{δδCt}=2^{(δCta-δCtb)}, where δCta=Ct target−Ct GAPDH, and δCtb=Ct reference−Ct GAPDH. (No reference cell line is used for the calculation of relative quantity; δCtb is defined as 21).

### Example 3

### Production of an Antibody Directed Against Protein Tyrosine Kinase Biomarker Polypeptides

[0264] Anti-protein tyrosine kinase biomarker polypeptide antibodies of the present invention can be prepared by a variety of methods as detailed hereinabove. As one example of an antibody-production method, cells expressing a polypeptide of the present invention are administered to an animal as immunogen to induce the production of sera containing polyclonal antibodies directed against the expressed polypeptide. In a preferred method, the expressed polypeptide is prepared, preferably isolated and/or purified, to render it substantially free of natural contaminants using techniques commonly practiced in the art. Such a preparation is then introduced into an animal in order to produce polyclonal antisera of greater specific activity for the expressed and isolated polypeptide.

[0265] In a most preferred method, the antibodies of the present invention are monoclonal antibodies (or protein binding fragments thereof) and can be prepared using hybridoma technology as detailed hereinabove. Cells expressing the polypeptide can be cultured in any suitable tissue culture medium; however, it is frequently preferable to culture cells in Earle's modified Eagle's medium supplemented to contain 10% fetal bovine serum (inactivated at about 56° C.), and supplemented to contain about 10 g/l nonessential amino acids, about 1.0 U/ml penicillin, and about 100 μg/ml streptomycin.

[0266] The splenocytes of immunized (and boosted) mice are extracted and fused with a suitable myeloma cell line. Any suitable myeloma cell line can be employed in accordance with the present invention; however, it is preferable to employ the parent myeloma cell line SP2/0, available from the ATCC. After fusion, the resulting hybridoma cells are selectively maintained in HAT medium, and then cloned by limiting dilution as described, for example, by Wands et al. (1981, Gastroenterology, 80:225-232). The hybridoma cells obtained through such a selection process are then assayed to identify those cell clones that secrete antibodies capable of binding to the polypeptide immunogen, or a portion thereof.

[0267] Alternatively, additional antibodies capable of binding to the polypeptide can be produced in a two-step procedure using anti-idiotypic antibodies. Such a method makes use of the fact that antibodies are themselves antigens, and therefore, it is possible to obtain a second antibody that binds to a first antibody. In accordance with this method, protein-specific antibodies are used to immunize an animal, preferably a mouse. The splenocytes of such an immunized animal are then used to produce hybridoma cells, and the hybridoma cells are screened to identify clones that produce an antibody whose ability to bind to the protein-specific antibodies can be blocked by the protein. Such antibodies comprise anti-idiotypic antibodies to the protein-specific antibody and can be used to immunize an animal to induce the formation of further protein-specific antibodies.

[0268] For in vivo use of antibodies in humans, it may be preferable to use “humanized” chimeric monoclonal antibodies. Such antibodies can be produced using genetic constructs derived from hybridoma cells producing the monoclonal antibodies described above. Methods for producing chimeric antibodies are known and practiced in the art. (See, e.g., for review, Morrison, 1985, Science, 229:1202); Oi et al., 1986, BioTechniques, 4:214; Cabilly et al., U.S. Pat. No. 4,816,567; Taniguchi et al., EP 171496; Morrison et al., EP 173494; Neuberger et al., WO 8601533; Robinson et al., WO 8702671; Boulianne et al., 1984, Nature, 312:643; and Neuberger et al., 1985, Nature, 314:268).

### Example 4

### Immunofluorescence Assays

[0269] The following immunofluorescence protocol can be used, for example, to verify protein tyrosine kinase biomarker expression in cells, or, for example, to check for the presence of one or more antibodies that bind protein tyrosine kinase biomarkers (polypeptides or peptides) expressed on the surfaces of cells. Briefly, Lab-Tek II chamber slides are coated overnight at 4° C. with 10 μg/ml of bovine collagen Type II in DPBS containing calcium and magnesium (DPBS++). The slides are then washed twice with cold DPBS++ and seeded with approximately 8000 CHO cells transfected with a vector comprising the coding sequence for a protein tyrosine kinase biomarker of the present invention or with CHO cells transfected with vector alone (control) in a total volume of 125 μl and incubated at 37° C. in the presence of 95% oxygen/5% carbon dioxide.

[0270] Thereafter, the culture medium is gently removed by aspiration and the adherent cells are washed twice with DPBS++ at ambient temperature. The slides are blocked with DPBS++ containing 0.2% BSA (blocker) at 0-4° C. for one hour. The blocking solution is gently removed by aspiration, and 125 μl of antibody containing solution (an antibody containing solution may be, for example, a hybridoma culture supernatant which is usually used undiluted, or serum/plasma which is usually diluted, e.g., a dilution of about 1:50, 1:100, 1:1000, and the like). The slides are incubated for 1 hour at 0-4° C. Antibody solutions are then gently removed by aspiration and the cells are washed 5 times with 400 μl of ice cold blocking solution. Next, 125 μl of 1 μg/ml rhodamine labeled secondary antibody (e.g., anti-human IgG) in blocker solution is added to the cells. Again, cells are incubated for 1 hour at 0-4° C.

[0271] The secondary antibody solution is then gently removed by aspiration and the cells are washed 3 times with 400 μl of ice cold blocking solution, and 5 times with cold DPBS++. The cells are then fixed with 125 μl of 3.7% formaldehyde in DPBS++ for 15 minutes at ambient temperature. Thereafter, the cells are washed 5 times with 400 μl of DPBS++ at ambient temperature. Finally, the cells are mounted in 50% aqueous glycerol and viewed using a fluorescence microscope using rhodamine filters.

### Example 5

### Complimentary Sequences

[0272] Antisense molecules or nucleic acid sequences complementary to the protein tyrosine kinase biomarker polypeptides-encoding sequence, or any part thereof, is used to decrease or to inhibit the expression of naturally occurring protein tyrosine kinase biomarker polypeptides. Although the use of antisense or complementary oligonucleotides comprising about 15 to 35 base-pairs is described, essentially the same procedure is used with smaller or larger nucleic acid sequence fragments. An oligonucleotide based on the coding sequence of protein tyrosine kinase biomarker polypeptides, as depicted in SEQ ID NO:1 thru 129, for example, is used to inhibit expression of naturally occurring protein tyrosine kinase biomarker polypeptides. The complementary oligonucleotide is typically designed from the most unique 5′ sequence and is used either to inhibit transcription by preventing promoter binding to the coding sequence, or to inhibit translation by preventing the ribosome from binding to the protein tyrosine kinase biomarker polypeptides-encoding transcript, among others. However, other regions may also be targeted.

[0273] Using an appropriate portion of the signal and 5′ sequence of SEQ ID NO:1 thru 129, an effective antisense oligonucleotide includes any of about 15-35 nucleotides spanning the region which translates into the signal or 5′ coding sequence, among other regions, of the polypeptide as depicted in SEQ ID NO:130 thru 242. Appropriate oligonucleotides may be designed using OLIGO 4.06 software and the protein tyrosine kinase biomarker polypeptides coding sequence (SEQ ID NO:1 thru 129). Preferred oligonucleotides are deoxynucleotide, or chimeric deoxynucleotide/ribonucleotide based and are provided below. The oligonucleotides may be synthesized using chemistry essentially as described in U.S. Pat. No. 5,849,902; which is hereby incorporated herein by reference in its entirety.

### Representative RNAi Reagent Sequences are as Follows

[0274]

| | | SEQ | | SEQ |
|---|---|---|---|---|
| Target | Sense Strand | ID | Anti-Sense Strand | ID |
| Name | RNAi Reagent | NO: | RNAi Reagent | NO: |
| EphB2-1 | AGCCGGCGCCATCTATGTCTT | 504 | AAAGCCGGCGCCATCTATGTCTT | 516 |
| EphB2-2 | CAAcTGGCTACGGACCAAGTT | 505 | AACAACTGGCTACGGACCAAGTT | 517 |
| EphB2-3 | ACGCTAATGGAGTCCACTATT | 506 | AAACGCTAATGGACTCCACTACA | 518 |
| EphB2-4 | GAGGTGAGTGGCTACGATGTT | 507 | AAGAGGTGAGTGGCTACGATGAG | 519 |
| IGFBP2-1 | TGGCGATGACCACTCAGAATT | 508 | AATGGCGATGACCAGTCAGAAGG | 520 |
| IGFBP2-2 | CCACGTGGACAGCACCATGTT | 509 | AACCACGTGGACAGCACCATGAA | 521 |
| IGFBP2-3 | GCCCCTCAAGTCGGCTATGTT | 510 | AAGCCCCTCAAGTCGGGTATGAA | 522 |
| IGFBP2-4 | GGGTGGCAAGCATCACCTTTT | 511 | AAGGGTGGCAAGCATCACCTTGG | 523 |
| MMP14-1 | GCCGACAGCGGTCTAGGAATT | 512 | AAGCCGACAGCGGTCTAGGAATT | 524 |
| MMP14-2 | GCAGGCCGACATCATGATCTT | 513 | AAGCAGGCCGACATCATGATCTT | 525 |
| MMP14-3 | CATTGGAGGAGACACCCACTT | 514 | AACATTGGAGGAGACACCCACTT | 526 |
| MMP14-4 | AGCAGACAAGCATTGGGTGTT | 515 | AAAGGAGACAAGCATTGGGTGTT | 527 |

[0275] Transfection of Post-Quiescent A549 Cells with Antisense Oligonucleotides.

[0276] Materials needed:
[0277] A549 cells can be maintained in DMEM with high glucose (Gibco-BRL) supplemented with 10% Fetal Bovine Serum, 2 mM L-Glutamine, and 1× penicillin/streptomycin.
[0278] Opti-MEM (Gibco-BRL)
[0279] Lipofectamine 2000 (Invitrogen)
[0280] Antisense oligomers (Qiagen)
[0281] Polystyrene tubes.
[0282] Tissue culture treated plates.

[0283] Quiescent cells are prepared as follows:

[0284] Day 0: 300,000 A549 cells are seeded in a T75 tissue culture flask in 10 ml of A549 media (as specified above), and incubated in at 37° C., 5% CO₂ in a humidified incubator for 48 hours.

[0285] Day 2: The T75 flasks are rocked to remove any loosely adherent cells, and the A549 growth media removed and replenished with 10 ml of fresh A549 media. The cells are cultured for six days without changing the media to create a quiescent cell population.

[0286] Day 8: Quiescent cells are plated in multi-well format and transfected with antisense oligonucleotides.

[0287] A549 cells are transfected according to the following:
[0288] 1. Trypsinize T75 flask containing quiescent population of A549 cells.
[0289] 2. Count the cells and seed 24-well plates with 60K quiescent A549 cells per well.
[0290] 3. Allow the cells to adhere to the tissue culture plate (approximately 4 hours).
[0291] 4. Transfect the cells with antisense and control oligonucleotides according to the following:
   [0292] a. A 10× stock of lipofectamine 2000 (10 ug/ml is 10×) may be prepared, and diluted lipid is allowed to stand at RT for 15 minutes.
   [0293] Stock solution of lipofectamine 2000 is 1 mg/ml.
   [0294] 10× solution for transfection is 10 ug/ml.
   [0295] To prepare 10× solution, dilute 10 ul of lipofectamine 2000 stock per 1 ml of Opti-MEM (serum free media).
   [0296] b. A 10× stock of each oligomer may be prepared for use in the transfection.
   [0297] Stock solutions of oligomers are at 100 uM in 20 mM HEPES, pH 7.5.
   [0298] 10× concentration of oligomer may be 0.25 uM.
   [0299] To prepare the 10× solutions, dilute 2.5 ul of oligomer per 1 ml of Opti-MEM.
   [0300] c. Equal volumes of the 10× lipofectamine 2000 stock and the 10× oligomer solutions are mixed well, and incubated for 15 minutes at RT to allow complexation of the oligomer and lipid. The resulting mixture is 5×.
   [0301] d. After the 15 minute complexation, 4 volumes of full growth media is added to the oligomer/lipid complexes (solution may be 1×).
   [0302] e. The media may be aspirated from the cells, and 0.5 ml of the 1× oligomer/lipid complexes added to each well.
   [0303] f. The cells are incubated for 16-24 hours at 37° C. in a humidified CO₂ incubator.
   [0304] g. Cell pellets are harvested for RNA isolation and TaqMan analysis of the expression of the protein tyrosine kinase biomarker polypeptides to assess level of knock-down.

### TaqMan Reactions

[0305] Quantitative RT-PCR analysis may be performed on total RNA preps that are treated with DNaseI or poly A selected RNA. The DNase treatment may be performed using methods known in the art, though preferably using a Qiagen RNeasy kit to purify the RNA samples, wherein DNase I treatment is performed on the column.

[0306] Briefly, a master mix of reagents may be prepared according to the following table:

DNase I Treatment

| Reagent | Per r'xn (in uL) |
|---|---|
| 10x Buffer | 2.5 |
| DNase I (1 unit/ul @ 1 unit per ug sample) | 2 |
| DEPC H₂O | 0.5 |
| RNA sample @ 0.1 ug/ul (2-3 ug total) | 20 |
| Total | 25 |

[0307] Next, 5 ul of master mix may be aliquoted per well of a 96-well PCR reaction plate (PE part # N801-0560). RNA samples are adjusted to 0.1 ug/ul with DEPC treated H₂O (if necessary), and 20 ul may be added to the aliquoted master mix for a final reaction volume of 25 ul.

[0308] The wells are capped using strip well caps (PE part # N801-0935), placed in a plate, and briefly spun in a plate centrifuge (Beckman) to collect all volume in the bottom of the tubes. Generally, a short spin up to 500 rpm in a Sorvall RT is sufficient.

[0309] The plates are incubated at 37° C. for 30 mins. Then, an equal volume of 0.1 mM EDTA in 10 mM Tris may be added to each well, and heat inactivated at 70° C. for 5 min. The plates are stored at −80° C. upon completion.

### RT Reaction

[0310] A master mix of reagents may be prepared according to the following table:

RT Reaction

| | RT | | No RT | |
|---|---|---|---|---|
| Reagent | Per Rx'n (in ul) | | Per Rx'n (in ul) | |
| 10x RT buffer | 5 | | 2.5 | |
| MgCl₂ | 11 | | 5.5 | |
| DNTP mixture | 10 | | 5 | |
| Random Hexamers | 2.5 | | 1.25 | |
| Rnase inhibitors | 1.25 | | 0.625 | |
| RT enzyme | 1.25 | | — | |
| Total RNA 500 ng (100 ng | 19.0 | max | 10.125 | max |
| no RT) | | | | |
| DEPC H₂O | — | | — | |
| Total | 50 | uL | 25 | uL |

[0311] Samples are adjusted to a concentration so that 500 ng of RNA is added to each RT rx'n (10 ng for the no RT). A maximum of 19 ul can be added to the RT rx'n mixture (10.125 ul for the no RT.) Any remaining volume up to the maximum values may be filled with DEPC treated H₂O, so that the total reaction volume is 50 ul (RT) or 25 ul (no RT).

[0312] On a 96-well PCR reaction plate (PE part # N801-0560), 37.5 ul of master mix may be aliquoted (22.5 ul of no RT master mix), and the RNA sample added for a total reaction volume of 50 ul (25 ul, no RT). Control samples are loaded into two or even three different wells in order to have enough template for generation of a standard curve.

[0313] The wells are capped using strip well caps (PE part # N801-0935), placed in a plate, and spin briefly in a plate centrifuge (Beckman) to collect all volume in the bottom of the tubes. Generally, a short spin up to 500 rpm in a Sorvall RT is sufficient.

[0314] For the RT-PCR reaction, the following thermal profile may be used:
[0315] 25° C. for 10 min
[0316] 48° C. for 30 min
[0317] 95° C. for 5 min
[0318] 4° C. hold (for 1 hour)
[0319] Store plate @-20° C. or lower upon completion.

### TaqMan Reaction (Template Comes from RT Plate)

[0320] A master mix may be prepared according to the following table:

TaqMan reaction (per well)

| Reagent | Per Rx'n (in ul) |
|---|---|
| TaqMan Master Mix | 4.17 |
| 100 uM Probe | .025 |
| 100 uM Forward primer | .05 |
| 100 uM Reverse primer | .05 |
| Template | — |
| DEPC H₂O | 18.21 |
| Total | 22.5 |

[0321] Appropriate forward, reverse, and probe primers may be designed for each protein tyrosine kinase biomarker polypeptides coding region for use in the RT-PCR reaction

[0322] Using a Gilson P-10 repeat pipetter, 22.5 ul of master mix is aliquouted per well of a 96-well optical plate. Then, using P-10 pipetter, 2.5 ul of sample is added to individual wells. Generally, RT samples are run in triplicate with each primer/probe set used, and no RT samples are run once and only with one primer/probe set, often gapdh (or other internal control).

[0323] A standard curve is then constructed and loaded onto the plate. The curve has five points plus one no template control (NTC,=DEPC treated H₂O). The curve may be made with a high point of 50 ng of sample (twice the amount of RNA in unknowns), and successive samples of 25, 10, 5, and 1 ng. The curve may be made from a control sample(s) (see above).

[0324] The wells are capped using optical strip well caps (PE part # N801-0935), placed in a plate, and spun in a centrifuge to collect all volume in the bottom of the tubes. Generally, a short spin up to 500 rpm in a Sorvall RT is sufficient.

[0325] Plates are loaded onto a PE 5700 sequence detector making sure the plate is aligned properly with the notch in the upper right hand corner. The lid may be tightened down and run using the 5700 and 5700 quantitation program and the SYBR probe using the following thermal profile:
[0326] 50° C. for 2 min
[0327] 95° C. for 10 min
   and the following for 40 cycles:
[0328] 95° C. for 15 sec
[0329] 60° C. for 1 min
   Change the reaction volume to 25 ul.

[0330] Once the reaction may be complete, a manual threshold of around 0.1 may be set to minimize the background signal. Additional information relative to operation of the GeneAmp 5700 machine may be found in reference to the following manuals: “GeneAmp 5700 Sequence Detection System Operator Training CD”; and the “User's Manual for 5700 Sequence Detection System”; available from Perkin-Elmer and hereby incorporated by reference herein in their entirety.

[0331] The skilled artisan would acknowledge that modifications to the above protocol may be required for each protein tyrosine kinase biomarker polypeptide of the present invention. The skilled artisan would also acknowledge that cell lines other than A549 could be used and that A549 are only provided as an example. The skilled artisan would also acknowledge that other means may be used to assess the ability of a complimentary oligonucleotide, such as the RNAi reagents provided in SEQ ID NO:501 to 524, which include, but are not limited to western blots and ELISA assays, among others.

### Example 6

### Alternative Method of Assessing Ability of Complimentary Sequences to Modulate Expression Levels of the Protein Tyrosine Kinase Biomarker Polypeptides of the Present Invention

[0332] Preferred complimentary sequences that may be assessed for their ability to modulate the expression levels the protein tyrosine kinase biomarker polypeptides of the present invention are provided as SEQ ID NO:504 to 527. Other complimentary sequences may be designed based upon the coding region of the protein tyrosine kinase biomarker polypeptides of the present invention as provided as SEQ ID NO:1 thru 129, and are specifically contemplated by the present invention.

### Co-Transfection RNAi

### Transfection

[0333] Day prior to transfection, seed 2×10⁵ HeLa cells per well of a 24 well dish. The following day, cells should be 90-95% confluent. Dilute 4.5 uL of 20 uM stock RNAi (one or more of SEQ ID NO:534 to 557) in 50 uL Optimem in a polystyrene tube for each RNAi to be transfected (tube A). Mix by gentle tapping. In another polystyrene tube combine 2 uL Lipofectamine 2000 with 50 uL Optimem (tube B). Mix by gentle tapping. Allow to sit at RT for 5′. Combine 50 uL tube B with the 50 uL for each tube A. Mix by gentle tapping. Allow to sit at RT for 15′. Add 500 uL serum/antibiotic-free MEM to each tube to give a final RNAi concentration of 150 nM. (For cotransfections of RNAi with plasmid, use 1 uL of 20 uM stock RNAi (final concentration of 33 nM) along with 1 ug vector DNA in tube A, and then proceed with transfection protocol above). Remove the media from HeLa plates and replace with the 600 uL transfection mix. Put in 37° C. 5% C02 incubator for 4-5 hours. Replace the media with MEM containing 10% FBS.

[0334] Controls to include in the transfection include a fluorescent oligonucleotide control (1 U/uL=20 uM) to calculate transfection efficiency, GFP B as a non-specific negative control, CDC2 as a normalizing knockdown control, and an untransfected control receiving no DNA.

### Lysis

[0335] 48 hours post-transfection, aspirate media and wash cells 1× with approx. 500 uL cold 1×PBS per well. Aspirate and replace with 100 uL cold RIPA containing protease inhibitors (1 mini BM protease inhibitor tablet/10 mL 1× RIPA). Rock and tap the plate a few times and place at 4° C. for 10-15 minutes. Tap/rock the plate several more times. Using a 200 uL pipetteman, aspirate 5-10 times and wash the well to ensure complete lysis and transfer of all material. Transfer lysate to an eppendorf tube and pipette up and down 5-10 times. If sample is still viscous, pipette up and down several more times. Spin samples down for 10′ at 14000 RPM 4° C. Samples can now be stored at −20° C. or prepared for loading.

### Western Blotting/Novex

[0336] Prepare sample by combining 20 uL lysate with 3 uL reducing reagent and 7 uL 4× gel loading dye. Heat at 70° C. for 10′ and then place samples on ice. While samples are heating, prepare desired gel (usually a 4-12% Bis-Tris gel) by removing comb and sealing tape. Place gels in gel box and fill inner and outer chambers with desired buffer (either 1×MES or MOPS— Add 50 mL 20× buffer to 950 mL dH₂O for each gel box). Add 600 uL Oxidizing reagent to the inner chamber. Wash out each well by blasting with 500 uL buffer. In well one, load 5 uL marker—Invitrogen's SeeBlue Plus2. Load samples in subsequent lanes. Run gel at 200V for 45-50 minutes. Make up 1× transfer buffer-50 mL 20× transfer buffer, Methanol (100 mL if transferring one gel, 200 mL if transferring 2 gels in the same apparatus) and dH20 to 1000 mL. Soak blotting pads in dH20 and then transfer buffer—make sure to push down on pads to rid of air bubbles. Soak precut Hybond-ECL membrane (Amersham nitrocellulose) in dH20 and then in transfer buffer. Cut the end off of Biorad filter paper to match size of transfer membrane. If transferring one gel, place 2 blotting pads into blotting chamber. For 2 gels, place down 1 pad. Briefly soak a filter paper in transfer buffer and carefully lay on blotting pad. Open gel cassette with cracking tool, cut off top, bottom and sides of gel. Briefly rinse it in transfer buffer and then lay it on filter paper carefully making sure no air bubbles are present. Lay transfer membrane on top again being careful there are no bubbles. Put down filter paper. Put down 2 blotting pads if transferring one gel to complete the sandwich. If transferring 2, put down 1 blotting pad, filter paper, gel, membrane, filter paper, blotting pad. Gels are now ready for transfer. Squeeze together the gel sandwich and place in transfer apparatus. Fill inner and outer chambers with transfer buffers. Transfer gels for 1 hour at 30V.

[0337] Remove membranes and place them in Superblock (Pierce) and rock at RT for a minimum of 1 hour-overnight. (I have stored membranes in Superblock at 4° C. over the weekend). Primary antibody and normalizing antibody are diluted in a 1:10 mix of Superblock:1×PBS/0.3% Tween-20. Membranes are incubated and rocked at RT in primary antibody for a minimum of 1 hour-overnight. Membranes are then washed thoroughly in 1×PBS/0.3% Tween-20. I usually give several quick rinses and then rinse 3×5′ in 1×PBS/0.3% Tween-20. During the final wash, HRP-conjugated secondary antibody is diluted in 1×PBS/0.3% Tween-20. Add this to membrane and rock at RT for a minimum of 30′. Wash membranes thoroughly. I usually give several quick rinses and then rinse 3×5′ in 1×PBS/0.3% Tween-20. Membranes are removed from wash buffer and the excess buffer drained by holding the edge of the membranes on a paper towel. Membranes are placed on Saran Wrap that has been smoothed on benchtop to remove air bubbles. Enough ECL reagent is added to cover the membrane for 1 minute. Remove membranes and drain off excess ECL on paper towel. Place membranes in between two transparency sheets, being careful to smooth out air bubbles.

### Quantitation

[0338] Expose membranes using Fluor S-Max. Relative percent inhibition may be determined by comparing the intensity of each band with RNAi treatment to the intensity of each band without RNAi treatment (control). Normalize lanes by dividing band of interest by normalizing band for each lane. Divide the normalized value for each treated sample by the normalized value of the control. Percent inhibition can then be calculated by using the formula (1-above value)×100.

[0339] The skilled artisan would acknowledge that modifications to the above protocol may be required for each protein tyrosine kinase biomarker polypeptide of the present invention.

TABLE 1

| | | Mean IC50 (uM) | Number of | | |
|---|---|---|---|---|---|
| # | Cell Lines | to BMS-A | tests | SD | Classification |
| 1 | Sk-LU-1 | 0.014 | 4 | 0.006 | Sensitive |
| 2 | L2987 | 0.037 | 4 | 0.012 | Sensitive |
| 3 | H226 | 0.058 | 3 | 0.018 | Sensitive |
| 4 | H838 | 0.072 | 4 | 0.009 | Sensitive |
| 5 | H661 | 0.123 | 4 | 0.067 | Sensitive |
| 6 | NCI-H596 | 0.124 | 2 | 0.023 | Sensitive |
| 7 | H441 | 0.141 | 4 | 0.081 | Sensitive |
| 8 | SK-MES-1 | 0.151 | 3 | 0.080 | Sensitive |
| 9 | H522 | 0.215 | 3 | 0.102 | Sensitive |
| 10 | SW1271 | 0.242 | 2 | 0.084 | Sensitive |
| 11 | SW900 | 0.507 | 3 | 0.300 | Sensitive |
| 14 | H2347 | 1.025 | 4 | 0.000 | Resistant |
| 18 | ChaGo-K-1 | >1.025 | 5 | 0.000 | Resistant |
| 16 | A549 | >1.025 | 4 | 0.000 | Resistant |
| 12 | H1155 | 1.025 | 3 | 0.000 | Resistant |
| 13 | H23 | 1.025 | 4 | 0.000 | Resistant |
| 15 | A-427 | >1.025 | 3 | 0.000 | Resistant |
| 17 | Calu-6 | >1.025 | 5 | 0.000 | Resistant |
| 19 | DMS114 | >1.025 | 5 | 0.000 | Resistant |
| 20 | DMS53 | >1.025 | 4 | 0.000 | Resistant |
| 21 | H157 | >1.025 | 5 | 0.000 | Resistant |
| 22 | LX-1 | >1.025 | 4 | 0.000 | Resistant |
| 23 | SHP-77 | >1.025 | 5 | 0.000 | Resistant |
| | Mean IC50 | 0.608 | | | |
| | across all 23 | | | | |
| | cell lines | | | | |

[0340] TABLE 2

| | | | | | | DNA | Amino | |
|---|---|---|---|---|---|---|---|---|
| | Highly | Genebank | Modulated | | | SEQ ID | Acid SEQ | SWISS-PROT |
| Gene No. | Expressed | Accession No. | by BMS-A | Unigene Title | Unigene | NO. | ID NO: | Accession No. |
| 1 | Sensitive cells | NM_004995 | | matrix metalloproteinase 14 | Hs.2399 | 1 | 130 | P50281 |
| | | | | (membrane-inserted) | | | | |
| 2 | Sensitive cells | NM_000138 | | fibrillin 1 (Marfan syndrome) | Hs.750 | 2 | 131 | P35555 |
| 3 | Sensitive cells | NM_002053 | | guanylate binding protein 1, interferon- | Hs.62661 | 3 | 132 | P32455 |
| | | | | inducible, 67 kDa | | | | |
| 4 | Sensitive cells | NM_005532 | | interferon, alpha-inducible protein 27 | Hs.278613 | 4 | 133 | P40305 |
| 5 | Sensitive cells | NM_012193 | | frizzled homolog 4 (Drosophila) | Hs.19545 | 5 | 134 | Q9ULV1 |
| 6 | Sensitive cells | NM_002998 | | syndecan 2 (heparan sulfate | Hs.1501 | 6 | 135 | P34741 |
| | | | | proteoglycan 1, cell surface-associated, | | | | |
| | | | | fibroglycan) | | | | |
| 7 | Sensitive cells | NM_030777 | | solute carrier family 2 (facilitated | Hs.305971 | 7 | 136 | O95528 |
| | | | | glucose transporter), member 10 | | | | |
| 8 | Sensitive cells | NM_002675 | | promyelocytic leukemia | Hs.89633 | 8 | 137 | P29590 |
| 9 | Sensitive cells | NM_005257 | | GATA binding protein 6 | Hs.50924 | 9 | 138 | Q92908 |
| 10 | Sensitive cells | NM_001993 | | coagulation factor III (thromboplastin, | Hs.62192 | 10 | 139 | P13726 |
| | | | | tissue factor) | | | | |
| 11 | Sensitive cells | NM_023927 | | hypothetical protein FLJ21313 | Hs.235445 | 11 | 140 | Q96HH9 |
| 12 | Sensitive cells | NM_000287 | Yes | peroxisomal biogenesis factor 6 | Hs.301636 | 12 | 141 | Q13608 |
| 13 | Sensitive cells | NM_018284 | | guanylate binding protein 3 | Hs.92287 | 13 | 142 | Q9NV33 |
| 14 | Sensitive cells | NM_017695 | | synaptotagmin-like 2 | Hs.92254 | 14 | 143 | Q96BJ2 |
| 15 | Sensitive cells | NM_003004 | | secreted and transmembrane 1 | Hs.95655 | 15 | 144 | Q8WVN6 |
| 16 | Sensitive cells | NM_018421 | | TBC1 domain family, member 2 | Hs.135917 | 16 | 145 | Q9BYX2 |
| 17 | Sensitive cells | NM_013258 | | apoptosis-associated speck-like protein | Hs.71869 | 17 | 146 | Q9ULZ3 |
| | | | | containing a CARD | | | | |
| 18 | Sensitive cells | NM_001423 | | epithelial membrane protein 1 | Hs.79368 | 18 | 147 | P54849 |
| 19 | Sensitive cells | NM_002204 | | integrin, alpha 3 (antigen CD49C, | Hs.265829 | 19 | 148 | P26006 |
| | | | | alpha 3 subunit of VLA-3 receptor) | | | | |
| 20 | Sensitive cells | T68858 | | ESTs | Hs.132159 | 20 | | |
| 21 | Sensitive cells | NM_001734 | | complement component 1, s | Hs.434029 | 21 | 149 | P09871 |
| | | | | subcomponent | | | | |
| 22 | Sensitive cells | NM_002501 | | nuclear factor I/X (CCAAT-binding | Hs.35841 | 22 | 150 | Q13051 |
| | | | | transcription factor) | | | | |
| 23 | Sensitive cells | NM_007173 | | protease, serine, 23 | Hs.25338 | 23 | 151 | O95084 |
| 24 | Sensitive cells | NM_001554 | Yes | cysteine-rich, angiogenic inducer, 61 | Hs.8867 | 24 | 152 | O00622 |
| 25 | Sensitive cells | NM_000930 | | plasminogen activator, tissue | Hs.274404 | 25 | 153 | P00750 |
| 26 | Sensitive cells | NM_002006 | Yes | fibroblast growth factor 2 (basic) | Hs.284244 | 26 | 154 | P78443 |
| 27 | Sensitive cells | BE967311 | | Homo sapiens clone IMAGE: 5294728 | Hs.284252 | 27 | | |
| | | | | mRNA | | | | |
| 28 | Sensitive cells | NM_004442 | | EphB2 | Hs.125124 | 28 | 155 | P29323 |
| 29 | Sensitive cells | NM_001547 | | interferon-induced protein with | Hs.169274 | 29 | 156 | P09913 |
| | | | | tetratricopeptide repeats 2 | | | | |
| 30 | Sensitive cells | NM_004105 | | EGF-containing fibulin-like | Hs.76224 | 30 | 157 | Q12805 |
| | | | | extracellular matrix protein 1 | | | | |
| 31 | Sensitive cells | BF059748 | | Glucosaminyl (N-acetyl) transferase 2, | Hs.375038 | 31 | 158 | NP_001482 |
| | | | | I-branching enzyme | | | | |
| 32 | Sensitive cells | NM_003979 | | retinoic acid induced 3 | Hs.194691 | 32 | 159 | O95357 |
| 33 | Sensitive cells | AA156240 | | Homo sapiens clone IMAGE: 4471726 | Hs.288660 | 33 | | |
| | | | | mRNA | | | | |
| 34 | Sensitive cells | NM_004370 | | collagen, type XII, alpha 1 | Hs.101302 | 34 | 160 | O43853 |
| 35 | Sensitive cells | NM_012232 | Yes | polymerase I and transcript release | Hs.29759 | 35 | 161 | O00535 |
| | | | | factor | | | | |
| 36 | Sensitive cells | NM_000104 | | cytochrome P450, family 1, subfamily | Hs.154654 | 36 | 162 | Q16678 |
| | | | | B, polypeptide 1 | | | | |
| 37 | Sensitive cells | BE889628 | | ESTs | Hs.374490 | 37 | | |
| 38 | Sensitive cells | NM_003364 | | uridine phosphorylase | Hs.77573 | 38 | 163 | Q16831 |
| 39 | Sensitive cells | AI004009 | Yes | ESTs, Weakly similar to hypothetical | Hs.357328 | 39 | | |
| | | | | protein FLJ20489 | | | | |
| 40 | Sensitive cells | NM_000110 | | dihydropyrimidine dehydrogenase | Hs.1602 | 40 | 164 | Q12882 |
| 41 | Sensitive cells | NM_024843 | | duodenal cytochrome b | Hs.31297 | 41 | 165 | Q96AP2 |
| 42 | Sensitive cells | NM_017654 | | hypothetical protein FLJ20073 | Hs.65641 | 42 | 166 | Q9NXS8 |
| 43 | Sensitive cells | NM_033386 | | molecule interacting with Rab13 | Hs.8535 | 43 | 167 | Q8N3F8 |
| 44 | Sensitive cells | AI970797 | | ESTs | Hs.133152 | 44 | | |
| 45 | Sensitive cells | NM_001175 | Yes | Rho GDP dissociation inhibitor (GDI) | Hs.83656 | 45 | 168 | P52566 |
| | | | | beta | | | | |
| 46 | Sensitive cells | NM_005529 | | heparan sulfate proteoglycan 2 | Hs.211573 | 46 | 169 | P98160 |
| | | | | (perlecan) | | | | |
| 47 | Sensitive cells | NM_005438 | Yes | FOS-like antigen 1 | Hs.283565 | 47 | 170 | P15407 |
| 48 | Sensitive cells | NM_144569 | | hypothetical protein FLJ25348 | Hs.62604 | 48 | 171 | Q96LN6 |
| 49 | Sensitive cells | NM_003302 | | thyroid hormone receptor interactor 6 | Hs.380230 | 49 | 172 | Q9BUE5 |
| 50 | Sensitive cells | NM_006355 | | tripartite motif-containing 38 | Hs.59545 | 50 | 173 | O00635 |
| 51 | Sensitive cells | NM_014963 | | KIAA0963 protein | Hs.7724 | 51 | 174 | Q9Y2G9 |
| 52 | Sensitive cells | NM_020132 | | 1-acylglycerol-3-phosphate O- | Hs.375204 | 52 | 175 | Q9NRZ7 |
| | | | | acyltransferase 3 | | | | |
| 53 | Sensitive cells | NM_032883 | | chromosome 20 open reading frame | Hs.26608 | 53 | 176 | Q96NM4 |
| | | | | 100 | | | | |
| 54 | Sensitive cells | NM_022350 | | aminopeptidase | Hs.280380 | 54 | 177 | Q9HBX2 |
| 55 | Sensitive cells | NM_000693 | | aldehyde dehydrogenase 1 family, | Hs.75746 | 55 | 178 | P47895 |
| | | | | member A3 | | | | |
| 56 | Sensitive cells | NM_013451 | | fer-1-like 3, myoferlin (C. elegans) | Hs.234680 | 56 | 179 | Q9NZM1 |
| 57 | Sensitive cells | AW953794 | | ESTs | Hs.444785 | 57 | | |
| 58 | Sensitive cells | NM_001848 | Yes | collagen, type VI, alpha 1 | Hs.108885 | 58 | 180 | P12109 |
| 59 | Sensitive cells | NM_002841 | | protein tyrosine phosphatase, receptor | Hs.89627 | 59 | 181 | P23470 |
| | | | | type, G | | | | |
| 60 | Sensitive cells | NM_015364 | | lymphocyte antigen 96 | Hs.69328 | 60 | 182 | Q9Y6Y9 |
| 61 | Sensitive cells | NM_016109 | | angiopoietin-like 4 | Hs.9613 | 61 | 183 | Q9BY76 |
| 62 | Sensitive cells | NM_000610 | | CD44 antigen (homing function and | Hs.169610 | 62 | 184 | P16070 |
| | | | | Indian blood group system) | | | | |
| 63 | Sensitive cells | NM_016235 | | G protein-coupled receptor, family C, | Hs.242407 | 63 | 185 | O75205 |
| | | | | group 5, member B | | | | |
| 64 | Sensitive cells | AI148659 | Yes | KIAA1237 protein | Hs.433452 | 64 | 186 | Q9ULI3 |
| 65 | Sensitive cells | BG032918 | | hypothetical protein LOC286167 | Hs.356036 | 65 | 187 | XP_212210 |
| 66 | Sensitive cells | NM_002068 | | guanine nucleotide binding protein (G | Hs.73797 | 66 | 188 | P30679 |
| | | | | protein), alpha 15 (Gq class) | | | | |
| 67 | Sensitive cells | AI972419 | | hypothetical protein LOC255104 | Hs.379377 | 67 | 189 | NP_859070 |
| 68 | Sensitive cells | NM_145040 | | protein kinase C, delta binding protein | Hs.431979 | 68 | 190 | Q969G5 |
| 69 | Sensitive cells | NM_006988 | Yes | a disintegrin-like and metalloprotease | Hs.8230 | 69 | 191 | Q9UHI8 |
| | | | | (reprolysin type) with thrombospondin | | | | |
| | | | | type 1 motif, 1 | | | | |
| 70 | Sensitive cells | NM_003113 | | nuclear antigen Sp 100 | Hs.77617 | 70 | 192 | P23497 |
| 71 | Sensitive cells | NM_000213 | | integrin, beta 4 | Hs.85266 | 71 | 193 | P16144 |
| 72 | Sensitive cells | NM_006622 | Yes | serum-inducible kinase | Hs.3838 | 72 | 194 | Q9NYY3 |
| 73 | Sensitive cells | BF513121 | | Homo sapiens clone IMAGE: 4794726 | Hs.367688 | 73 | | |
| 74 | Sensitive cells | NM_004572 | | plakophilin 2 | Hs.25051 | 74 | 195 | Q99959 |
| 75 | Sensitive cells | NM_001250 | | tumor necrosis factor receptor | Hs.25648 | 75 | 196 | P25942 |
| | | | | superfamily, member 5 | | | | |
| 76 | Sensitive cells | NM_058166 | | tripartite motif-containing 6 | Hs.350518 | 76 | 197 | Q9C030 |
| 77 | Sensitive cells | NM_004159 | | proteasome (prosome, macropain) | Hs.180062 | 77 | 198 | P28062 |
| | | | | subunit, beta type, 8 (large | | | | |
| | | | | multifunctional protease 7) | | | | |
| 78 | Sensitive cells | NM_002526 | | 5′-nucleotidase, ecto (CD73) | Hs.153952 | 78 | 199 | P21589 |
| 79 | Sensitive cells | AB037784 | | KIAA 1363 protein | Hs.22941 | 79 | 200 | Q9P2I4 |
| 80 | Sensitive cells | AF098641.1 | | Homo sapiens CD44 isoform RC | Hs.306278 | 80 | 201 | O95370 |
| | | | | (CD44) mRNA | | | | |
| 81 | Sensitive cells | NM_018222 | | parvin, alpha | Hs.44077 | 81 | 202 | Q9NVD7 |
| 82 | Resistant cells | NM_015163 | | tripartite motif-containing 9 | Hs.75090 | 82 | 203 | NP_055978 |
| 83 | Resistant cells | NM_002260 | | killer cell lectin-like receptor subfamily | Hs.177605 | 83 | 204 | P26717 |
| | | | | C, member 2 | | | | |
| 84 | Resistant cells | NM_021076 | | neurofilament, heavy polypeptide | Hs.198760 | 84 | 205 | Q9UJS7 |
| | | | | 200 kDa | | | | |
| 85 | Resistant cells | NM_002612 | | pyruvate dehydrogenase kinase, | Hs.8364 | 85 | 206 | Q16654 |
| | | | | isoenzyme 4 | | | | |
| 86 | Resistant cells | NM_002600 | | phosphodiesterase 4B, cAMP-specific | Hs.188 | 86 | 207 | Q07343 |
| | | | | (phosphodiesterase E4 dunce homolog, | | | | |
| | | | | Drosophila) | | | | |
| 87 | Resistant cells | NM_006558 | | KH domain containing, RNA binding, | Hs.13565 | 87 | 208 | NP_006549 |
| | | | | signal transduction associated 3 | | | | |
| 88 | Resistant cells | AV726956 | | Homo sapiens clone IMAGE: 5313992 | Hs.47209 | 88 | | |
| | | | | mRNA | | | | |
| 89 | Resistant cells | NM_006203 | | phosphodiesterase 4D, cAMP-specific | Hs.172081 | 89 | 209 | O43862 |
| | | | | (phosphodiesterase E3 dunce homolog, | | | | |
| | | | | Drosophila) | | | | |
| 90 | Resistant cells | NM_017899 | Yes | hypothetical protein FLJ20607 | Hs.18791 | 90 | 210 | Q9NWT9 |
| 91 | Resistant cells | R70320 | | Homo sapiens cDNA FLJ11869 fis, | Hs.120910 | 91 | 211 | Q9HAA8 |
| | | | | clone HEMBA1007002. | | | | |
| 92 | Resistant cells | H16409 | | Homo sapiens cDNA FLJ30478 fis, | Hs.298258 | 92 | | |
| | | | | clone BRAWH1000167. | | | | |
| 93 | Resistant cells | NM_021784 | | forkhead box A2 | Hs.155651 | 93 | 212 | Q9Y261 |
| 94 | Resistant cells | NM_018014 | | B-cell CLL/lymphoma 11A (zinc finger | Hs.130881 | 94 | 213 | Q9H164 |
| | | | | protein) | | | | |
| 95 | Resistant cells | NM_014368 | | LIM homeobox protein 6 | Hs.103137 | 95 | 214 | Q9UPM6 |
| 96 | Resistant cells | AK021980 | | Homo sapiens cDNA FLJ11918 fis, | Hs.289068 | 96 | | |
| | | | | clone HEMBB1000272. | | | | |
| 97 | Resistant cells | NM_003355 | | uncoupling protein 2 (mitochondrial, | Hs.80658 | 97 | 215 | P55851 |
| | | | | proton carrier) | | | | |
| 98 | Resistant cells | NM_015982 | Yes | germ cell specific Y-box binding | Hs.142989 | 98 | 216 | Q9Y2T7 |
| | | | | protein | | | | |
| 99 | Resistant cells | NM_002847 | | protein tyrosine phosphatase, receptor | Hs.74624 | 99 | 217 | Q92932 |
| | | | | type, N polypeptide 2 | | | | |
| 100 | Resistant cells | AA722878 | | nuclear protein p30 | Hs.326184 | 100 | 218 | XP_113908 |
| 101 | Resistant cells | NM_001873 | | carboxypeptidase E | Hs.75360 | 101 | 219 | P16870 |
| 102 | Resistant cells | NM_015973 | | galanin | Hs.278959 | 102 | 220 | P22466 |
| 103 | Resistant cells | NM_001881 | | cAMP responsive element modulator | Hs.155924 | 103 | 221 | O75519 |
| 104 | Resistant cells | NM_004114 | | fibroblast growth factor 13 | Hs.6540 | 104 | 222 | Q92913 |
| 105 | Resistant cells | NM_021800 | Yes | J domain containing protein 1 | Hs.260720 | 105 | 223 | Q9UKB3 |
| 106 | Resistant cells | AL522781 | | Homo sapiens cDNA FLJ31154 fis, | Hs.349705 | 106 | | |
| | | | | clone IMR322001665. | | | | |
| 107 | Resistant cells | AV709727 | | Homo sapiens mRNA; cDNA | Hs.21380 | 107 | | |
| | | | | DKFZp586P1124 | | | | |
| 108 | Resistant cells | NM_005639 | | synaptotagmin I | Hs.154679 | 108 | 224 | P21579 |
| 109 | Resistant cells | NM_003081 | | synaptosomal-associated protein, | Hs.84389 | 109 | 225 | P13795 |
| | | | | 25 kDa | | | | |
| 110 | Resistant cells | NM_002166 | Yes | inhibitor of DNA binding 2, dominant | Hs.180919 | 110 | 226 | Q02363 |
| | | | | negative helix-loop-helix protein | | | | |
| 111 | Resistant cells | NM_000597 | | insulin-like growth factor binding | Hs.433326 | 111 | 227 | P18065 |
| | | | | protein 2, 36 kDa | | | | |
| 112 | Resistant cells | NM_001986 | | ets variant gene 4 (E1A enhancer | Hs.77711 | 112 | 228 | P43268 |
| | | | | binding protein, E1AF) | | | | |
| 113 | Resistant cells | NM_000814 | | gamma-aminobutyric acid (GABA) A | Hs.1440 | 113 | 229 | P28472 |
| | | | | receptor, beta 3 | | | | |
| 114 | Resistant cells | NM_001438 | | estrogen-related receptor gamma | Hs.151017 | 114 | 230 | O75454 |
| 115 | Resistant cells | NM_005010 | Yes | neuronal cell adhesion molecule | Hs.7912 | 115 | 231 | O15179 |
| 116 | Resistant cells | BF432648 | | Homo sapiens full length insert cDNA | Hs.48376 | 116 | | |
| | | | | clone ZD45C04 | | | | |
| 117 | Resistant cells | NM_005678 | | SNRPN upstream reading frame | Hs.58606 | 117 | 232 | Q9Y675 |
| 118 | Resistant cells | NM_024326 | | hypothetical protein MGC11279 | Hs.380081 | 118 | 233 | Q9H469 |
| 119 | Resistant cells | NM_002923 | | regulator of G-protein signalling 2, | Hs.78944 | 119 | 234 | P41220 |
| | | | | 24 kDa | | | | |
| 120 | Resistant cells | NM_020990 | | creatine kinase, mitochondrial 1 | Hs.153998 | 120 | 235 | P12532 |
| | | | | (ubiquitous) | | | | |
| 121 | Resistant cells | NM_032471 | | protein kinase (cAMP-dependent, | Hs.106106 | 121 | 236 | Q9C010 |
| | | | | catalytic) inhibitor beta | | | | |
| 122 | Resistant cells | AL137517 | | hypothetical protein DKFZp564O1278 | Hs.334473 | 122 | 237 | Q9NT60 |
| 123 | Resistant cells | AW006185 | | Homo sapiens cDNA | Hs.282596 | 123 | | |
| | | | | DKFZp686M2414 | | | | |
| 124 | Resistant cells | NM_021992 | | thymosin, beta, identified in | Hs.56145 | 124 | 238 | Q99406 |
| | | | | neuroblastoma cells | | | | |
| 125 | Resistant cells | BF056204 | | KIAA1917 protein | Hs.294151 | 125 | 239 | Q96PX1 |
| 126 | Resistant cells | AI950069 | | Homo sapiens clone IMAGE: 5274257 | Hs.405823 | 126 | | |
| 127 | Resistant cells | NM_006434 | | sorbin and SH3 domain containing 1 | Hs.108924 | 127 | 240 | O43857 |
| 128 | Resistant cells | NM_005967 | | NGFI-A binding protein 2 (EGR1 | Hs.159223 | 128 | 241 | Q15742 |
| | | | | binding protein 2) | | | | |
| 129 | Resistant cells | BG258131 | | Homo sapiens cDNA FLJ37478 fis, | Hs.318529 | 129 | 242 | NP_848652 |
| | | | | clone BRAWH2013219, weakly | | | | |
| | | | | similar to Homo sapiens N- | | | | |
| | | | | acetyltransferase Camello 2 (CML2) | | | | |
| | | | | mRNA. | | | | |

[0341] TABLE 3

| | | 15 markers as | | | 40 markers as | | |
|---|---|---|---|---|---|---|---|
| | | shown in Table 4 | | | shown in Table 5 | | |
| | True | Predicted | | | Predicted | | |
| Cell Line | Class | Class | Confidence | Error | Class | Confidence | Error |
| SK-LU-1 | S | S | 1.000 | | S | 0.916 | |
| L2987 | S | S | 0.555 | | S | 0.738 | |
| H226 | S | S | 0.938 | | S | 0.859 | |
| H838 | S | S | 0.592 | | S | 0.480 | |
| H661 | S | S | 0.375 | | S | 0.168 | |
| NCI-H596 | S | S | 0.894 | | S | 0.886 | |
| H441 | S | S | 0.140 | | S | 0.476 | |
| SK-MES-1 | S | S | 0.795 | | S | 0.704 | |
| H522 | S | S | 0.153 | | S | 0.195 | |
| SW1271 | S | S | 0.805 | | S | 0.602 | |
| SW900 | S | S | 0.988 | | S | 0.917 | |
| H1155 | R | R | 0.923 | | R | 0.929 | |
| H23 | R | R | 0.995 | | R | 0.872 | |
| H2347 | R | S | 0.161 | * | S | 0.117 | * |
| A-427 | R | R | 0.952 | | R | 0.888 | |
| A549 | R | R | 0.465 | | R | 0.421 | |
| Calu-6 | R | R | 0.871 | | R | 0.713 | |
| ChaGo-k-1 | R | R | 0.671 | | R | 0.667 | |
| DMS114 | R | R | 0.319 | | R | 0.467 | |
| DMS53 | R | R | 0.833 | | R | 0.760 | |
| H157 | R | R | 0.183 | | R | 0.092 | |
| LX-1 | R | R | 0.562 | | R | 0.690 | |
| SHP-77 | R | R | 1.000 | | R | 0.989 | |

[0342] TABLE 4

| Highly Expressed | | |
|---|---|---|
| in | Unigene Title | Unigene |
| Sensitive cells | matrix metalloproteinase 14 | Hs.2399 |
| | (membrane-inserted) | |
| Sensitive cells | secreted and transmembrane 1 | Hs.95655 |
| Sensitive cells | fibrillin 1 (Marfan syndrome) | Hs.750 |
| Sensitive cells | solute carrier family 2 (facilitated glucose | Hs.305971 |
| | transporter), member 10 | |
| Sensitive cells | synaptotagmin-like 2 | Hs.92254 |
| Sensitive cells | guanylate binding protein 1, | Hs.62661 |
| | interferon-inducible, 67 kDa | |
| Sensitive cells | promyelocytic leukemia | Hs.89633 |
| Sensitive cells | GATA binding protein 6 | Hs.50924 |
| Resistant cells | cAMP responsive element modulator | Hs.155924 |
| Resistant cells | tripartite motif-containing 9 | Hs.75090 |
| Resistant cells | killer cell lectin-like receptor subfamily C, | Hs.177605 |
| | member 2 | |
| Resistant cells | KH domain containing, RNA binding, | Hs.13565 |
| | signal transduction associated 3 | |
| Resistant cells | nuclear protein p30 | Hs.326184 |
| Resistant cells | phosphodiesterase 4D, cAMP-specific | Hs.172081 |
| | (phosphodiesterase E3 dunce homolog, | |
| | Drosophila) | |
| Resistant cells | LIM homeobox protein 6 | Hs.103137 |

[0343] TABLE 5

| Highly Expressed | | |
|---|---|---|
| in | Unigene Title | Unigene |
| Sensitive cells | matrix metalloproteinase 14 (membrane-inserted) | Hs.2399 |
| Sensitive cells | secreted and transmembrane 1 | Hs.95655 |
| Sensitive cells | fibrillin 1 (Marfan syndrome) | Hs.750 |
| Sensitive cells | solute carrier family 2 (facilitated glucose transporter), member 10 | Hs.305971 |
| Sensitive cells | synaptotagmin-like 2 | Hs.92254 |
| Sensitive cells | guanylate binding protein 1, interferon-inducible, 67 kDa | Hs.62661 |
| Sensitive cells | promyelocytic leukemia | Hs.89633 |
| Sensitive cells | GATA binding protein 6 | Hs.50924 |
| Sensitive cells | polymerase I and transcript release factor | Hs.29759 |
| Sensitive cells | TBC1 domain family, member 2 | Hs.135917 |
| Sensitive cells | syndecan 2 (heparan sulfate proteoglycan 1, cell surface- | Hs.1501 |
| | associated, fibroglycan) | |
| Sensitive cells | hypothetical protein FLJ21313 | Hs.235445 |
| Sensitive cells | cysteine-rich, angiogenic inducer, 61 | Hs.8867 |
| Sensitive cells | KIAA1363 protein | Hs.22941 |
| Sensitive cells | peroxisomal biogenesis factor 6 | Hs.301636 |
| Sensitive cells | interferon, alpha-inducible protein 27 | Hs.278613 |
| Sensitive cells | coagulation factor III (thromboplastin, tissue factor) | Hs.62192 |
| Sensitive cells | frizzled homolog 4 (Drosophila) | Hs.19545 |
| Sensitive cells | protease, serine, 23 | Hs.25338 |
| Sensitive cells | molecule interacting with Rab13 | Hs.8535 |
| Resistant cells | cAMP responsive element modulator | Hs.155924 |
| Resistant cells | tripartite motif-containing 9 | Hs.75090 |
| Resistant cells | killer cell lectin-like receptor subfamily C, member 2 | Hs.177605 |
| Resistant cells | KH domain containing, RNA binding, signal transduction | Hs.13565 |
| | associated 3 | |
| Resistant cells | nuclear protein p30 | Hs.326184 |
| Resistant cells | phosphodiesterase 4D, cAMP-specific (phosphodiesterase E3 | Hs.172081 |
| | dunce homolog, Drosophila) | |
| Resistant cells | LIM homeobox protein 6 | Hs.103137 |
| Resistant cells | pyruvate dehydrogenase kinase, isoenzyme 4 | Hs.8364 |
| Resistant cells | uncoupling protein 2 (mitochondrial, proton carrier) | Hs.80658 |
| Resistant cells | inhibitor of DNA binding 2, dominant negative helix-loop-helix | Hs.180919 |
| | protein | |
| Resistant cells | neurofilament, heavy polypeptide 200 kDa | Hs.198760 |
| Resistant cells | Homo sapiens cDNA FLJ30478 fis, clone BRAWH1000167. | Hs.298258 |
| Resistant cells | hypothetical protein FLJ20607 | Hs.18791 |
| Resistant cells | Homo sapiens clone IMAGE: 5274257 | Hs.405823 |
| Resistant cells | creatine kinase, mitochondrial 1 (ubiquitous) | Hs.153998 |
| Resistant cells | Homo sapiens, clone IMAGE: 5313992, mRNA | Hs.47209 |
| Resistant cells | Homo sapiens cDNA FLJ31154 fis, clone IMR322001665. | Hs.349705 |
| Resistant cells | germ cell specific Y-box binding protein | Hs.142989 |
| Resistant cells | B-cell CLL/lymphoma 11A (zinc finger protein) | Hs.130881 |
| Resistant cells | phosphodiesterase 4B, cAMP-specific (phosphodiesterase E4 | Hs.188 |
| | dunce homolog, Drosophila) | |

[0344] TABLE 6

| Genbank | RT-PCR | RT-PCR | SEQ |
|---|---|---|---|
| Accession | Primer | Primer | ID |
| No. | Type | Sequence | NO: |
| NM_004995 | Forward Primer | CAAGCATTGGGTGTTTGATG | 243 |
| NM_004995 | Reverse Primer | CTTGGGGTACTCGCTATCCA | 244 |
| NM_000138 | Forward Primer | TGCATCAGTGGGAACTGTGT | 245 |
| NM_000138 | Reverse Primer | CAGCAGGAAGCTITGGAAAC | 246 |
| NM_002053 | Forward Primer | GGTCCAGTTGCTGAAAGAGC | 247 |
| NM_002053 | Reverse Primer | CTTGGTTAGGGGTGACAGGA | 248 |
| NM_005532 | Forward Primer | GCCTCTGCTCTCACCTCATC | 249 |
| NM_005532 | Reverse Primer | ATCTTGGCTGCTATGGAGGA | 250 |
| NM_012193 | Forward Primer | TGGGCACTTTTTCGGTATTC | 251 |
| NM_012193 | Reverse Primer | TCACCCAACCATTTCCTCTC | 252 |
| NM_002998 | Forward Primer | TGTGCCCTTAAAACCAAACC | 253 |
| NM_002998 | Reverse Primer | GCAAATCTGCCCAAAGCTAC | 254 |
| NM_030777 | Forward Primer | GTCAGTGCCTTCTCCTTTGG | 255 |
| NM_030777 | Reverse Primer | CAGTCCGTAGAGCAGGAAGG | 256 |
| NM_002675 | Forward Primer | GGAGCAGGATAGTGCCTTTG | 257 |
| NM_002675 | Reverse Primer | GACTGGCCATCTCCTCGTAG | 258 |
| NM_005257 | Forward Primer | TCCAGAAGCCAGGACTAGGA | 259 |
| NM_005257 | Reverse Primer | TGTGTACCAAATGGCCTCAA | 260 |
| NM_001993 | Forward Primer | TTGAGGGGCTGACTTCAATC | 261 |
| NM_001993 | Reverse Primer | GCTGCCCAGAATACCAATGT | 262 |
| NM_023927 | Forward Primer | CTTAGTGTCCCAACGGAGGA | 263 |
| NM_023927 | Reverse Primer | GGCGTTTGGCACTAGAAGAG | 264 |
| NM_000287 | Forward Primer | ATGGCTCCCTTCAGAGGAAT | 265 |
| NM_000287 | Reverse Primer | CAAGGTGACTACAGGCAGCA | 266 |
| NM_018284 | Forward Primer | AGATGGACAACCCCTCACAC | 267 |
| NM_018284 | Reverse Primer | CATTGACCTTGATGCCTCCT | 268 |
| NM_017695 | Forward Primer | CTCCAAGTTGCCAGAAGGTC | 269 |
| NM_017695 | Reverse Primer | CTTGATTTGGGACCCATTTG | 270 |
| NM_003004 | Forward Primer | AAGGCAGAGAGGACACAGGA | 271 |
| NM_003004 | Reverse Primer | ACTGAGGAAGCAGAGCTTGG | 272 |
| NM_018421 | Forward Primer | ACTACTGCAACACGCTGACG | 273 |
| NM_018421 | Reverse Primer | TACAGGAAGGCATCCCAGAC | 274 |
| NM_013258 | Forward Primer | AGTTTCACACCAGCCTGGAA | 275 |
| NM_013258 | Reverse Primer | TTTTCAAGCTGGCTTTTCGT | 276 |
| NM_001423 | Forward Primer | ATTGCCAATGTCTGGTTGGT | 277 |
| NM_001423 | Reverse Primer | CATGGTGAAGAGCTGGAACA | 278 |
| NM_002204 | Forward Primer | CAGAGAGACCCTGCAAGACC | 279 |
| NM_002204 | Reverse Primer | CTCAAATGGGCCTTAGGACA | 280 |
| T68858 | Forward Primer | TCAAAACACTCCTGGGCTCT | 281 |
| T68858 | Reverse Primer | TCCCTGAAACTCGCCATATC | 282 |
| NM_001734 | Forward Primer | CAGGCATATCCCAGTGAGGT | 283 |
| NM_001734 | Reverse Primer | CAATTGGAGAGTGGGGATTG | 284 |
| NM_002501 | Forward Primer | TACTCCCCGTACTGCCTCAC | 285 |
| NM_002501 | Reverse Primer | GCCCACTTCTGCTTGATCTC | 286 |
| NM_007173 | Forward Primer | ACTTACGAAGAGGCCAAGCA | 287 |
| NM_007173 | Reverse Primer | GTCCTTCCCAAAAATGCTGA | 288 |
| NM_001554 | Forward Primer | CAGCTGACCAGGACTGTGAA | 289 |
| NM_001554 | Reverse Primer | TCTAGGTGTGCCCTGGAAAC | 290 |
| NM_000930 | Forward Primer | CAAGTCTCCTTCCCCTTTCC | 291 |
| NM_000930 | Reverse Primer | GGGTTGTGGCAACAGAAAGT | 292 |
| NM_002006 | Forward Primer | TGAGCCCAGGAGTTCAAGAC | 293 |
| NM_002006 | Reverse Primer | CTCTGTTGCCTAGGCTGGAC | 294 |
| BE967311 | Forward Primer | AAGGGCTATCGGGAAACATT | 295 |
| BE967311 | Reverse Primer | TGCACGGTATTAAAGCACCA | 296 |
| NM_004442 | Forward Primer | GATGGGGCAGTACAAGGAGA | 297 |
| NM_004442 | Reverse Primer | AGGCAGGTGAATGTCAAACC | 298 |
| NM_001547 | Forward Primer | GCGTGAAGAAGGTGAAGAGG | 299 |
| NM_001547 | Reverse Primer | AATTTGGCAATGCAGGTAGG | 300 |
| NM_004105 | Forward Primer | TGGAAGATTGCTCTCCGAGT | 301 |
| NM_004105 | Reverse Primer | ATGGTTTCTTCGGTGTCCTG | 302 |
| BF059748 | Forward Primer | GAAACCCACTAGCCCAAACA | 303 |
| BF059748 | Reverse Primer | CTCAGGGTCAGCAGTGGAGT | 304 |
| NM_003979 | Forward Primer | TCGTCGCAATGAAGACTTTG | 305 |
| NM_003979 | Reverse Primer | CGGTCAAAGTCAGGAAGCAT | 306 |
| AA156240 | Forward Primer | ACGCAGAAGGGAGAGGAGAT | 307 |
| AA156240 | Reverse Primer | CAGGGTTTTGGGTCTGTGTT | 308 |
| NM_004370 | Forward Primer | ACCTGTCACTGTTCGGGAAG | 309 |
| NM_004370 | Reverse Primer | TGAGGGAAGTGCTGGTCTCT | 310 |
| NM_012232 | Forward Primer | GGACACAGTCCGAGTGGAAT | 311 |
| NM_012232 | Reverse Primer | GGGATCAGGGTGAGAATGAA | 312 |
| NM_000104 | Forward Primer | AAGAAGCAAGAGGCAAGCTG | 313 |
| NM_000104 | Reverse Primer | AGCTCCTGCATAGCCCACTA | 314 |
| BE889628 | Forward Primer | CCCCTCTTGACCCAATATCA | 315 |
| BE889628 | Reverse Primer | GGTCCACCACCAAGTCAAAG | 316 |
| NM_003364 | Forward Primer | CCAGCCTTGTTTGGAGATGT | 317 |
| NM_003364 | Reverse Primer | AAGGAATGCCCATACCATGA | 318 |
| AI004009 | Forward Primer | GACAGAAACGGAAAGGCAAA | 319 |
| AI004009 | Reverse Primer | GGCTGGTCTCAAACTCCTGA | 320 |
| NM_000110 | Forward Primer | CGGGGAGTCGTGATTGTACT | 321 |
| NM_000110 | Reverse Primer | TATAACCTTCCGTGGGGACA | 322 |
| NM_024843 | Forward Primer | TCGTCTGGGTCCTCCACTAC | 323 |
| NM_024843 | Reverse Primer | TGGCAGCAACTGCATTTAAC | 324 |
| NM_017654 | Forward Primer | GCAGAGTGGAGATGTGTGGA | 325 |
| NM_017654 | Reverse Primer | CAATGGGAAATCCCAGGTAA | 326 |
| NM_033386 | Forward Primer | CTGAACCTGAGGGCAAGAAG | 327 |
| NM_033386 | Reverse Primer | GACTGATCTGAGGGGAGCAG | 328 |
| AI970797 | Forward Primer | GGAGGGAGGGTCTACCAATG | 329 |
| AI970797 | Reverse Primer | ATACAGCTTTGGGCTCAGGA | 330 |
| NM_001175 | Forward Primer | ACCCTGGTTTGTGAGAGTGC | 331 |
| NM_001175 | Reverse Primer | CACTTTCACCCCAGTCCTGT | 332 |
| NM_005529 | Forward Primer | CAGCTCAGGTACCCAGGAAG | 333 |
| NM_005529 | Reverse Primer | TAAGCTGCCTCCACGCTTAT | 334 |
| NM_005438 | Forward Primer | CGAAGGCCTTGTGAACAGAT | 335 |
| NM_005438 | Reverse Primer | CTTCTGCTTCTGCAGCTCCT | 336 |
| NM_144569 | Forward Primer | ACCCCTTCTACCCTCCAAGA | 337 |
| NM_144569 | Reverse Primer | AGTACCTCCTGCATGGAACG | 338 |
| NM_003302 | Forward Primer | CCCACTCCAGCCTCTTACAC | 339 |
| NM_003302 | Reverse Primer | CTGGCTCTCTCTGGCTCCTA | 340 |
| NM_006355 | Forward Primer | CTCCCCAGAAGAGCAGTGAC | 341 |
| NM_006355 | Reverse Primer | GGTTTTCCTTCCAACCCCTA | 342 |
| NM_014963 | Forward Primer | CACCCCCAGACATCACCTAC | 343 |
| NM_014963 | Reverse Primer | TGGTTCTCCAGGATGACTCC | 344 |
| NM_020132 | Forward Primer | GGTCAGCAAGCAGCTCTACC | 345 |
| NM_020132 | Reverse Primer | CACCCACAGAGGAAGTCGAT | 346 |
| NM_032883 | Forward Primer | TTCGTCATCCTCACAGCAAG | 347 |
| NM_032883 | Reverse Primer | ACGACGTCAAGAACCCAAAC | 348 |
| NM_022350 | Forward Primer | CTGCTTTTTGACCCCAAGAC | 349 |
| NM_022350 | Reverse Primer | TCATCAAATTGCAGCTCTGG | 350 |
| NM_000693 | Forward Primer | TCGAGAGTGGGAAGAAGGAA | 351 |
| NM_000693 | Reverse Primer | TCGGTGCTATTCGCTCTTTT | 352 |
| NM_013451 | Forward Primer | CTTCCTCAGGGGAACATGAA | 353 |
| NM_013451 | Reverse Primer | ATCCGAAAGGAGCCCTTAAA | 354 |
| AW953794 | Forward Primer | CATCCAGAGCTGCTGAGAAA | 355 |
| AW953794 | Reverse Primer | TGGAACACACCATTGCATTT | 356 |
| NM_001848 | Forward Primer | CTGGGCGTCAAAGTCTTCTC | 357 |
| NM_001848 | Reverse Primer | GAGCAGCACACTTGCTCAAC | 358 |
| NM_002841 | Forward Primer | GGGACAATTCTGCACTGGAT | 359 |
| NM_002841 | Reverse Primer | ACGGGTCTCCGGAAGACTAT | 360 |
| NM_015364 | Forward Primer | ATTGGGTCTGCAACTCATCC | 361 |
| NM_015364 | Reverse Primer | CGCTTTGGAAGATTCATGGT | 362 |
| NM_016109 | Forward Primer | GCCTATAGCCTGCAGCTCAC | 363 |
| NM_016109 | Reverse Primer | AGTACTGGCCGTTGAGGTTG | 364 |
| NM_000610 | Forward Primer | AAGGTGGAGCAAACACAACC | 365 |
| NM_000610 | Reverse Primer | TCCACTTGGCTTTCTGTCCT | 366 |
| NM_016235 | Forward Primer | ATGAGAGCTCACCAGGTGCT | 367 |
| NM_016235 | Reverse Primer | TCAGGAGCAGTGTGATCAGG | 368 |
| A1148659 | Forward Primer | CCAGGCAGAACTGATTCCAT | 369 |
| A1148659 | Reverse Primer | AGGGGGACCATTCAGGTCTA | 370 |
| BG032918 | Forward Primer | GGGTGGTCAAGCTGTGAGAT | 371 |
| BG032918 | Reverse Primer | ACAGCAGCAGCCTTTTAGGA | 372 |
| NM_002068 | Forward Primer | TGGGGCTAGTAGAGCCTTCA | 373 |
| NM_002068 | Reverse Primer | GATTTCTCTCGTCCGCAAAC | 374 |
| A1972419 | Forward Primer | GAGTGAGCTGCCTTCTTTG | 375 |
| A1972419 | Reverse Primer | AGCTTTGGAGTCTGGCTGTC | 376 |
| NM_145040 | Forward Primer | TCTTCAAGGAGGAGGGTGAA | 377 |
| NM_145040 | Reverse Primer | CGGAGGCTCTGTACCTTCTG | 378 |
| NM_006988 | Forward Primer | CAATGCCCTTCGACCTAAAA | 379 |
| NM_006988 | Reverse Primer | TCACTTCCTTTGCACACTCG | 380 |
| NM_003113 | Forward Primer | TACCAGAGCCCATGGATTTC | 381 |
| NM_003113 | Reverse Primer | CCTGCTGGGTATTCTCCAAG | 382 |
| NM_000213 | Forward Primer | TGGAAGTACTGTGCCTGCTG | 383 |
| NM_000213 | Reverse Primer | TGCATGTTGTTGGTGACCTT | 384 |
| NM_006622 | Forward Primer | CAGCAGATTGGGGATGCTAT | 385 |
| NM_006622 | Reverse Primer | TTGGTGACCCACTGAAATGA | 386 |
| BF513121 | Forward Primer | TCACCACAAACTACAGTGTCAGC | 387 |
| BF513121 | Reverse Primer | GAAAGAAGCAAATTATCACTGAACA | 388 |
| NM_004572 | Forward Primer | CCCAAGAAACCTCAAAAGCA | 389 |
| NM_004572 | Reverse Primer | TTTGATTCCAGGAAGCCATC | 390 |
| NM_001250 | Forward Primer | GCAGGCACAAACAAGACTGA | 391 |
| NM_001250 | Reverse Primer | AGGAAGATCGTCGGGAAAAT | 392 |
| NM_058166 | Forward Primer | GCAGTTCTTTGTGCAGACCA | 393 |
| NM_058166 | Reverse Primer | TTCTCAGCTTCCTGCTCCTC | 394 |
| NM_004159 | Forward Primer | GCTATTCTGGAGGCGTTGTC | 395 |
| NM_004159 | Reverse Primer | AGGCCTCTTCTTCTCCTTGG | 396 |
| NM_002526 | Forward Primer | ACGCAACAATGGCACAATTA | 397 |
| NM_002526 | Reverse Primer | CAGGTTTTCGGGAAAGATCA | 398 |
| AB037784 | Forward Primer | CTGCCAGTGGGAACATCTTT | 399 |
| AB037784 | Reverse Primer | CCATCTTCCCAGGAGTGAAA | 400 |
| AF098641.1 | Forward Primer | CCCAGATGGAGAAAGCTCTG | 401 |
| AF098641.1 | Reverse Primer | TGACGACTCCTTGTTCACCA | 402 |
| NM_018222 | Forward Primer | TTCTTGCTGTTGGCGTACTG | 403 |
| NM_018222 | Reverse Primer | TCCCAACCTTCATTGCTAGG | 404 |
| NM_015163 | Forward Primer | TCAACAAGGAGCATGAGCAC | 405 |
| NM_015163 | Reverse Primer | AGTGTGCCTTTACCCCACTG | 406 |
| NM_002260 | Forward Primer | CATTTGCATTGTCCTGATGG | 407 |
| NM_002260 | Reverse Primer | CAGGCCAGCAAACTCTCTTC | 408 |
| NM_021076 | Forward Primer | ACTCCCCAAAATTCCCTCTG | 409 |
| NM_021076 | Reverse Primer | CTTCTTCACCCCCTTCTTCC | 410 |
| NM_002612 | Forward Primer | CACCAGGAAAATCAGCCTTC | 411 |
| NM_002612 | Reverse Primer | TAACCAAAACCAGCCAAAGG | 412 |
| NM_002600 | Forward Primer | ATACCGATCGCATTCAGGTC | 413 |
| NM_002600 | Reverse Primer | TGGGATTTTTCCACAGAAGC | 414 |
| NM_006558 | Forward Primer | GGGACATGCTTTGGAAGAAA | 415 |
| NM_006558 | Reverse Primer | GCTGTAACTCCTCCCCTTCC | 416 |
| AV726956 | Forward Primer | AGGAGCCTGGAGGAAATGTT | 417 |
| AV726956 | Reverse Primer | CCCCTATAAGAATGCGCAGA | 418 |
| NM_006203 | Forward Primer | CCAGTCTGCGAACTGTACGA | 419 |
| NM_006203 | Reverse Primer | TGCCTGGTCTGTAGGGTCTC | 420 |
| NM_017899 | Forward Primer | TCCGATCCAAAATTGTTCGT | 421 |
| NM_017899 | Reverse Primer | TCCGAGTCGTACATGTGGAA | 422 |
| R70320 | Forward Primer | TGCAAAAGAAACTGGAACTTGA | 423 |
| R70320 | Reverse Primer | TGCTTATTTCTTCCACCTGAA | 424 |
| H16409 | Forward Primer | CAACTGGCATCTACACAAGACA | 425 |
| H16409 | Reverse Primer | ATTGGTCCCCATAGCAGATG | 426 |
| NM_021784 | Forward Primer | CTACGCCAACATGAACTCCA | 427 |
| NM_021784 | Reverse Primer | GAGGTCCATGATCCACTGGT | 428 |
| NM_018014 | Forward Primer | AGTCCTGCAGAGTCCTTCCA | 429 |
| NM_018014 | Reverse Primer | ATGCGCATTTCCACAATACA | 430 |
| NM_014368 | Forward Primer | TCATCCAGGTGTGGTTTCAA | 431 |
| NM_014368 | Reverse Primer | CCCGCACTGTACCTGACTCT | 432 |
| AK021980 | Forward Primer | AAAGGGAATGTGGCCTTTTT | 433 |
| AK021980 | Reverse Primer | TGAAAGAGATCCCCAGCCTA | 434 |
| NM_003355 | Forward Primer | CTCCCTTCTGAGCCTCTCCT | 435 |
| NM_003355 | Reverse Primer | CTCCACCAGCACTGAGACAA | 436 |
| NM_015982 | Forward Primer | ACCCTACCCAGTACCCTGCT | 437 |
| NM_015982 | Reverse Primer | TGAGTTACGGGAGGGAGTTG | 438 |
| NM_002847 | Forward Primer | ACGATGGAGTGTTTGGAAGG | 439 |
| NM_002847 | Reverse Primer | AGGACGCCTCAGGTAGGTTT | 440 |
| AA722878 | Forward Primer | AGGTCAGCCACATTCAGGAG | 441 |
| AA722878 | Reverse Primer | TGCGGAGTATGGTCACTGAG | 442 |
| NM_001873 | Forward Primer | CCTTCGAGTACCACCGCTAC | 443 |
| NM_001873 | Reverse Primer | TTCCCATGCATATTCCCAAT | 444 |
| NM_015973 | Forward Primer | GCGCACAATCATTGAGTTTC | 445 |
| NM_015973 | Reverse Primer | TGCATAAATTGGCCGAAGAT | 446 |
| NM_001881 | Forward Primer | CAGATCCGAGCTCCTACTGC | 447 |
| NM_001881 | Reverse Primer | CAGCCACACGATTTTCAAGA | 448 |
| NM_004114 | Forward Primer | ACAAGCCTGCAGCTCATTTT | 449 |
| NM_004114 | Reverse Primer | CTTTTGCCCTCACTGGCTAC | 450 |
| NM_021800 | Forward Primer | GTTTCCGAGGGAAGAAGGAC | 451 |
| NM_021800 | Reverse Primer | AGCTTTGGGGTTTTCAGGAT | 452 |
| AL522781 | Forward Primer | AAGGAACAGGAATGCTGTGG | 453 |
| AL522781 | Reverse Primer | CTAAAGCCAGCCCCATACAG | 454 |
| AV709727 | Forward Primer | GTCATGAGTCTCGGCTGGTT | 455 |
| AV709727 | Reverse Primer | GTCGGTCACTGGTTGAACTG | 456 |
| NM_005639 | Forward Primer | CATTCTGGAGGCAAAGAACC | 457 |
| NM_005639 | Reverse Primer | CCACCTGCACTTTCTGGATT | 458 |
| NM_003081 | Forward Primer | ATGCCCGAGAAAATGAAATG | 459 |
| NM_003081 | Reverse Primer | ACCACTTCCCAGCATCTTTG | 460 |
| NM_002166 | Forward Primer | CCCAGAACAAGAAGGTGAGC | 461 |
| NM_002166 | Reverse Primer | AATTCAGAAGCCTGCAAGGA | 462 |
| NM_000597 | Forward Primer | GAGAAGGTCACTGAGCAGCA | 463 |
| NM_000597 | Reverse Primer | GGGATGTGCAGGGAGTAGAG | 464 |
| NM_001986 | Forward Primer | GCAGATCCCCACTGTCCTAC | 465 |
| NM_001986 | Reverse Primer | GTTCTCTGTGGTTGGGGAAA | 466 |
| NM_000814 | Forward Primer | GGCTACGACATTCGCCTAAG | 467 |
| NM_000814 | Reverse Primer | TCAGCCACTCGATTGTCAAG | 468 |
| NM_001438 | Forward Primer | CAGCTGTTCGTCCTTCATCA | 469 |
| NM_001438 | Reverse Primer | GTTTCCTGACAGGCCCACTA | 470 |
| NM_005010 | Forward Primer | TCACCATTGTGGACCAAAGA | 471 |
| NM_005010 | Reverse Primer | CTCTGGGAGGACATTGGAAA | 472 |
| BF432648 | Forward Primer | GGTTGCTCTTGAAATCCTCCT | 473 |
| BF432648 | Reverse Primer | TCCTTGGAAACATTTGAGGAA | 474 |
| NM_005678 | Forward Primer | TGGCACCTTTAAGGCTTTTG | 475 |
| NM_005678 | Reverse Primer | CCGAGCAATGCCAGTATCTT | 476 |
| NM_024326 | Forward Primer | GACGGTGTCAGGACATTGG | 477 |
| NM_024326 | Reverse Primer | CCTGCAGGTTGACAAAAGGT | 478 |
| NM_002923 | Forward Primer | CAACTGCCCAGAAAAGGGTA | 479 |
| NM_002923 | Reverse Primer | ATGGCAGGTCACAGTCCTTC | 480 |
| NM_020990 | Forward Primer | ACGTGGTACTGGAGGAGTGG | 481 |
| NM_020990 | Reverse Primer | AATGCTTGGTGTGGATGACA | 482 |
| NM_032471 | Forward Primer | CTCTCCGTGAAGGAAGATGC | 483 |
| NM_032471 | Reverse Primer | CTGCTTAGGGCTGCAATGTT | 484 |
| AL137517 | Forward Primer | TCACCACTCACAGGGTCAAA | 485 |
| AL137517 | Reverse Primer | GTGGGCTCCAGGATAATGTG | 486 |
| AW006185 | Forward Primer | CCCAAGGTAAGTGAAAAGTTGG | 487 |
| AW006185 | Reverse Primer | ACATGCAAGTTTGGAAACAGT | 488 |
| NM_021992 | Forward Primer | TCACCTATGTTCCCTGGCTAA | 489 |
| NM_021992 | Reverse Primer | ATGGAAGCACCCATCATAGC | 490 |
| BF056204 | Forward Primer | AGCGTGCTAAACTCCAGGTG | 491 |
| BF056204 | Reverse Primer | TATTGCCTTCAGGTGGTGTG | 492 |
| A1950069 | Forward Primer | TGGTATCCAAGGCCACAACT | 493 |
| A1950069 | Reverse Primer | GGGCAGCCAGAAAAATCAT | 494 |
| NM_006434 | Forward Primer | ACTGGTGAAAAACCCTGTGG | 495 |
| NM_006434 | Reverse Primer | GCGGAGTTCCAACTCATCAT | 496 |
| NM_005967 | Forward Primer | AATCCAGGGCTCTTCAGTCA | 497 |
| NM_005967 | Reverse Primer | CCAGGCAGTGGTGATAGCTT | 498 |
| BG258131 | Forward Primer | ACTTGCAGGTGTCTCCCTTG | 499 |
| BG258131 | Reverse Primer | TTAACAAGTCCTGCCAGCAA | 500 |

What is claimed is:

1. A predictor set comprising at least one polynucleotide whose expression pattern is predictive of the response of lung cancer cells or tissues to treatment with a compound that modulates protein tyrosine kinase activity or one or more members of the protein tyrosine kinase pathway.

2. The predictor set according to claim 1 wherein the at least one polynucleotide is selected from the group consisting of:
a) the polynucleotides provided in Table 2;
b) the sensitive predictor polynucleotides provided in Table 2; and
c) the resistant predictor polynucleotides provided in Table 2.

3. The predictor set according to claim 2 wherein the at least one polynucleotide comprise a number of polynucleotides selected from the group consisting of:
a) at least about 1 polynucleotides;
b) at least about 3 polynucleotides;
c) at least about 5 polynucleotides;
d) at least about 7 polynucleotides;
e) at least about 10 polynucleotides;
f) at least about 15 polynucleotides;
g) at least about 20 polynucleotides;
h) at least about 25 polynucleotides;
i) at least about 30 polynucleotides; and
j) at least about 40 polynucleotides.

4. The predictor set according to claim 3 wherein the at least one polynucleotide comprises a member of the group consisting of:
a) the polynucleotides provided in Table 3;
b) the sensitive predictor polynucleotides provided in Table 3;
c) the resistant predictor polynucleotides provided in Table 3;
d) the polynucleotides provided in Table 4;
e) the sensitive predictor polynucleotides provided in Table 4;
f) the resistant predictor polynucleotides provided in Table 4;
g) the polynucleotides provided in Table 5;
h) the sensitive predictor polynucleotides provided in Table 5; and
i) the resistant predictor polynucleotides provided in Table 5.

5. The predictor set according to claim 4 wherein the compound is selected from the group consisting of:
a) antisense reagents directed to said polynucleotides;
b) antibodies directed against polypeptides encoded by said at least one polynucleotides; and
c) small molecule compounds.

6. The predictor set according to claim 5 wherein the compound is BMS-A.

7. A predictor set comprising a at least one polypeptide whose expression pattern is predictive of the response of lung cancer cells or tissues to treatment with compounds that modulate protein tyrosine kinase activity or at least one member of the protein tyrosine kinase pathway.

8. The predictor set according to claim 7 wherein the at least one polypeptide is selected from the group consisting of:
a) the polypeptides provided in Table 2;
b) the sensitive predictor polypeptides provided in Table 2; and
c) the resistant predictor polypeptides provided in Table 2.

9. The predictor set according to claim 8 wherein the at least one polypeptide comprises a number of polypeptides selected from the group consisting of:
a) at least about 1 polypeptides;
b) at least about 3 polypeptides;
c) at least about 5 polypeptides;
d) at least about 7 polypeptides;
e) at least about 10 polypeptides;
f) at least about 15 polypeptides;
g) at least about 20 polypeptides;
h) at least about 25 polypeptides;
i) at least about 30 polypeptides; and
j) at least about 40 polypeptides.

10. The predictor set according to claim 9 wherein the at least one polypeptide comprises a member of the group consisting of:
a) polypeptides provided in Table 3;
b) the sensitive predictor polypeptides provided in Table 3;
c) the resistant predictor polypeptides provided in Table 3;
d) the polypeptides provided in Table 4;
e) the sensitive predictor polypeptides provided in Table 4;
f) the resistant predictor polypeptides provided in Table 4;
g) the polypeptides provided in Table 5;
h) the sensitive predictor polypeptides provided in Table 5; and
i) the resistant predictor polypeptides provided in Table 5.

11. The predictor set according to claim 10 wherein the compound is selected from the group consisting of:
a) antisense reagents directed against polynucleotides encoding said at least one polypeptides;
b) antibodies directed against said at least one polypeptides; and
c) small molecule compounds.

12. The predictor set according to claim 11 wherein the compound is BMS-A.

13. A method for predicting whether a compound is capable of modulating the activity of lung cancer cells or tissues, comprising the steps of:
a) obtaining a sample of lung cancer cells or tissues;
b) determining whether said cells express at least one marker; and
c) correlating the expression of said at least one marker to the compounds ability to modulate the activity of said lung cancer cells or tissues.

14. The method according to claim 13 wherein the plurality of markers are polynucleotides.

15. The method according to claim 14 wherein the polynucleotides are the polynucleotides of claim 4.

16. The method according to claim 15 wherein the compound are a member of the group consisting of:
a) the compound according to claim 5;
b) the compound according to claim 6;
c) the compound according to claim 11; and
d) the compound according to claim 12.

17. The method according to claim 13 wherein the at least one marker are the polypeptides of claim 10.

18. A plurality of lung cancer cell lines for identifying polynucleotides and polypeptides whose expression levels correlate with compound sensitivity or resistance of cells associated with a disease state.

19. The plurality of cell lines according to claim 18 wherein said cell lines comprise one or more cell lines provided in Table 1.

20. A method of identifying polynucleotides and polypeptides that predict compound sensitivity or resistance of cells associated with a disease state, comprising the steps of:
a) subjecting the plurality of cell lines according to claim 18 to one or more compounds;
b) analyzing the expression pattern of at least one polynucleotide or at least one polypeptide; and
c) selecting at least one polynucleotide or at least one polypeptide that predicts the sensitivity or resistance of said cells associated with a disease state by using said expression pattern of said at least one polynucleotide or at least one polypeptide.

21. A method for predicting whether a subject requiring treatment for lung cancer, will successfully respond or will not respond to said treatment comprising the steps of:
a) obtaining a sample of cells or tissues from said subject;
b) determining whether said cells or tissues express at least one marker; and
c) correlating the expression of said at least one marker to the subjects ability to respond to said treatment;
wherein said treatment comprises at least one compound from claim 5, 6, 11, or 12.

22. The method according to claim 21 wherein the at least one marker are polynucleotides.

23. The method according to claim 22 wherein the polynucleotides are the polynucleotides of claim 4.

24. The method according to claim 23 wherein the at least one marker are polypeptides.

25. The method according to claim 24 wherein the polypeptides are the polypeptides of claim 10.

26. A method of screening for candidate compounds capable of binding to and/or modulating the activity of at least one protein tyrosine kinase marker polypeptide, comprising:
a) contacting a test compound with a polypeptide according to claim 10; and
b) selecting as candidate compounds those test compounds that bind to and/or modulate activity of the polypeptide.

27. A method of treating lung cancer in a subject, comprising administering a modulator of one or more protein tyrosine kinase biomarker polypeptides, wherein said polypeptide(s) is selected from the group consisting of:
a) polypeptides provided in Table 2;
b) the sensitive predictor polypeptides provided in Table 2;
c) the resistant predictor polypeptides provided in Table 2;
d) polypeptides provided in Table 3;
e) the sensitive predictor polypeptides provided in Table 3;
f) the resistant predictor polypeptides provided in Table 3;
g) the polypeptides provided in Table 4;
h) the sensitive predictor polypeptides provided in Table 4;
i) the resistant predictor polypeptides provided in Table 4;
j) the polypeptides provided in Table 5; and
k) the sensitive predictor polypeptides provided in Table 5.

The application's sequence listing, which the Patent Office published only in electronic form, follows.

SEQUENCE LISTING (527 sequences)

SEQ ID NO: 1 - DNA, 3558 bp, Homo sapiens
cagaccccagttcgccgactaagcagaagaaagatcaaaaaccggaaaagaggagaagagcaaacaggcactttgaggaacaatcccctttaactccaagccgacagcggtctaggaattcaagttcagtgcctaccgaagacaaaggcgccccgagggagtggcggtgcgaccccagggcgtgggcccggccgcggagcccacactgcccggctgacccggtggtctcggaccatgtctcccgccccaagacccccccgttgtctcctgctccccctgctcacgctcggcaccgcgctcgcctccctcggctcggcccaaagcagcagcttcagccccgaagcctggctacagcaatatggctacctgcctcccggggacctacgtacccacacacagcgctcaccccagtcactctcagcggccatcgctgccatgcagaagttttacggcttgcaagtaacaggcaaagctgatgcagacaccatgaaggccatgaggcgcccccgatgtggtgttccagacaagtttggggctgagatcaaggccaatgttcgaaggaagcgctacgccatccagggtctcaaatggcaacataatgaaatcactttctgcatccagaattacacccccaaggtgggcgagtatgccacatacgaggccattcgcaaggcgttccgcgtgtgggagagtgccacaccactgcgcttccgcgaggtgccctatgcctacatccgtgagggccatgagaagcaggccgacatcatgatcttctttgccgagggcttccatggcgacagcacgcccttcgatggtgagggcggcttcctggcccatgcctacttcccaggccccaacattggaggagacacccactttgactctgccgagccttggactgtcaggaatgaggatctgaatggaaatgacatcttcctggtggctgtgcacgagctgggccatgccctggggctcgagcattccagtgacccctcggccatcatggcacccttttaccagtggatggacacggagaattttgtgctgcccgatgatgaccgccggggcatccagcaactttatgggggtgagtcagggttccccaccaagatgccccctcaacccaggactacctcccggccttctgttcctgataaacccaaaaaccccacctatgggcccaacatctgtgacgggaactttgacaccgtggccatgctccgaggggagatgtttgtcttcaaggagcgctggttctggcgggtgaggaataaccaagtgatggatggatacccaatgcccattggccagttctggcggggcctgcctgcgtccatcaacactgcctacgagaggaaggatggcaaattcgtcttcttcaaaggagacaagcattgggtgtttgatgaggcgtccctggaacctggctaccccaagcacattaaggagctgggccgagggctgcctaccgacaagattgatgctgctctcttctggatgcccaatggaaagacctacttcttccgtggaaacaagtactaccgtttcaacgaagagctcagggcagtggatagcgagtaccccaagaacatcaaagtctgggaagggatccctgagtctcccagagggtcattcatgggcagcgatgaagtcttcacttacttctacaaggggaacaaatactggaaattcaacaaccagaagctgaaggtagaaccgggctaccccaagtcagccctgagggactggatgggctgcccatcgggaggccggccggatgaggggactgaggaggagacggaggtgatcatcattgaggtggacgaggagggcggcggggcggtgagcgcggctgccgtggtgctgcccgtgctgctgctgctcctggtgctggcggtgggccttgcagtcttcttcttcagacgccatgggacccccaggcgactgctctactgccagcgttccctgctggacaaggtctgacgcccaccgccggcccgcccactcctaccacaaggactttgcctctgaaggccagtggcagcaggtggtggtgggtgggctgctcccatcgtcccgagccccctccccgcagcctccttgcttctctctgtcccctggctggcctccttcaccctgaccgcctccctccctcctgccccggcattgcatcttccctagataggtcccctgagggctgagtgggagggcggccctttccagcctctgcccctcaggggaaccctgtagctttgtgtctgtccagccccatctgaatgtgttgggggctctgcacttgaaggcaggaccctcagacctcgctggtaaaggtcaaatggggtcatctgctccttttccatcccctgacataccttaacctctgaactctgacctcaggaggctctgggcactccagccctgaaagccccaggtgtacccaattggcagcctctcactactctttctggctaaaaggaatctaatcttgttgagggtagagaccctgagacagtgtgagggggtggggactgccaagccaccctaagaccttgggaggaaaactcagagagggtcttcgttgctcagtcagtcaagttcctcggagatctgcctctgcctcacctaccccagggaacttccaaggaaggagcctgagccactggggactaagtgggcagaagaaacccttggcagccctgtgcctctcgaatgttagccttggatggggctttcacagttagaagagctgaaaccaggggtgcagctgtcaggtagggtggggccggtgggagaggcccgggtcagagccctgggggtgagcctgaaggccacagagaaagaaccttgcccaaactcaggcagctggggctgaggcccaaaggcagaacagccagagggggcaggaggggaccaaaaaggaaaatgaggacgtgcagcagcattggaaggctggggccgggcaggccaggccaagccaagcagggggccacagggtgggctgtggagctctcaggaagggccctgaggaaggcacacttgctcctgttggtccctgtccttgctgcccaggcagcgtggaggggaagggtagggcagccagagaaaggagcagagaaggcacacaaacgaggaatgaggggcttcacgagaggccacagggcctggctggccacgctgtcccggcctgctcaccatctcagtgaggggcaggagctggggctcgcttaggctgggtccacgcttccctggtgccagcacccctcaagcctgtctcaccagtggcctgccctctcgctcccccacccagcccacccattgaagtctccttgggccaccaaaggtggtggccatggtaccggggacttgggagagtgagacccagtggagggagcaagaggagagggatgtcgggggggtggggcacggggtaggggaaatggggtgaacggtgctggcagttcggctagatttctgtcttgtttgtttttttgttttgtttaatgtatatttttattataattattatatatgaattccaaaaaaaaaaaaaaaaaaaaa

SEQ ID NO: 2 - DNA, 9749 bp, Homo sapiens
gagcccggcccgggggacgggcggcgggatagcgggaccccggcggcgcggtgcgcttcagggcgcagcggcggccgcagaccgagccccgggcgcggcaagaggcggcgggagccggtggcggctcggcatcatgcgtcgagggcgtctgctggagatcgccctgggatttaccgtgcttttagcgtcctacacgagccatggggcggacgccaatttggaggctgggaacgtgaaggaaaccagagccagtcgggccaagagaagaggcggtggaggacacgacgcgcttaaaggacccaatgtctgtggatcacgttataatgcttactgttgccctggatggaaaaccttacctggcggaaatcagtgtattgtccccatttgccggcattcctgtggggatggattttgttcgaggccaaatatgtgcacttgcccatctggtcagatagctccttcctgtggctccagatccatacaacactgcaatattcgctgtatgaatggaggtagctgcagtgacgatcactgtctatgccagaaaggatacatagggactcactgtggacaacctgtttgtgaaagtggctgtctcaatggaggaaggtgtgtggccccaaatcgatgtgcatgcacttacggatttactggaccccagtgtgaaagagattacaggacaggcccatgttttactgtgatcagcaaccagatgtgccagggacaactcagcgggattgtctgcacaaaaacgctctgctgtgccacagtcggccgagcctggggccacccctgtgagatgtgtcctgcccagcctcacccctgccgccgtggcttcattccaaatatccgcacgggagcttgtcaagatgtggatgaatgccaggccatccccgggctctgtcagggaggaaattgcattaatactgttgggtcttttgagtgcaaatgccctgctggacacaaacttaatgaagtgtcacaaaaatgtgaagatattgatgaatgcagcaccattcctggaatctgtgaagggggtgaatgtacaaacacagtcagcagttacttttgcaaatgtccccctggtttttacacctctccagatggtaccagatgcatagatgttcgcccaggatactgttacacagctctgacaaacgggcgctgctctaaccagctgccacagtccataaccaaaatgcagtgctgctgtgatgccggccgatgctggtctccaggggtcactgtcgcccctgagatgtgtcccatcagagcaaccgaggatttcaacaagctgtgctctgttcctatggtaattcctgggagaccagaatatcctcccccaccccttggccccattcctccagttctccctgttcctcctggctttcctcctggacctcaaattccggtccctcgaccaccagtggaatatctgtatccatctcgggagccaccaagggtgctgccagtaaacgttactgattactgccagttggtccgctatctctgtcaaaatggacgctgcattccaactcctgggagttgccggtgtgagtgcaacaaagggttccagctggacctccgtggggagtgtattgatgttgatgaatgtgagaaaaacccctgtgctggtggtgagtgtattaacaaccagggttcgtacacctgtcagtgccgagctggatatcagagcacactcacgcggacagaatgccgagacattgatgagtgtttacagaatggccggatctgcaataatggacgctgcatcaacacagatggcagttttcattgcgtgtgtaatgcgggctttcatgttacacgagatgggaagaactgtgaagatatggatgaatgcagcataaggaacatgtgccttaatggaatgtgtatcaatgaagatggcagttttaaatgtatttgcaaacctggattccagctggcatcagatggacgttattgcaaagacattaacgagtgtgaaacccctgggatctgcatgaatgggcgttgcgtcaacactgatggctcctacagatgtgaatgcttccctggactggctgtgggtctggatggccgtgtgtgtgttgacacacacatgcggagcacatgctatggtggatacaagagaggccagtgtatcaaacctttgtttggtgctgtcactaaatctgaatgctgttgcgccagcactgagtatgcatttggggaaccttgccagccgtgtcctgcacagaattcagcggaatatcaggcactctgcagcagtgggccaggaatgacgtcagcaggcagtgatataaatgaatgtgcactagatcctgatatttgcccaaatggaatctgtgaaaaccttcgtgggacctataaatgtatatgcaattcaggatatgaagtggattcaactgggaaaaactgcgttgatattaatgaatgtgtactgaacagtctcctttgtgacaatggacaatgtagaaatactcctggaagttttgtctgtacctgccccaagggatttatctacaaacctgatctaaaaacatgtgaagacattgatgaatgcgaatcaagtccttgcattaatggagtctgcaagaacagcccaggctcttttatttgtgaatgttcttctgaaagtactttggatccaacaaaaaccatctgcatagaaaccatcaagggcacttgctggcagactgtcattgatgggcgatgtgagatcaacatcaatggagccaccttaaagtcccagtgctgctcctccctcggtgctgcgtggggaagcccgtgcaccctatgccaagttgatcccatatgtggtaaagggtactcaagaattaaaggaacacaatgtgaagatatagatgaatgtgaagtgttcccaggagtgtgtaaaaatggcctgtgtgttaacactagggggtcattcaagtgtcagtgtcccagtggaatgactttggatgccacaggaaggatctgtcttgatatccgcctggaaacctgcttcctgaggtacgaggacgaggagtgcaccctgcctattgctggccgccaccgcatggacgcctgctgctgctccgtcggggcagcctggggtactgaggaatgcgaggagtgtcccatgagaaatactcctgagtacgaggagctgtgtccgagaggacccggatttgccacaaaagaaattacaaatggaaagcctttcttcaaagatatcaatgagtgcaagatgatacccagcctctgcacccacggcaagtgcagaaacaccattggcagctttaagtgcaggtgtgacagcggctttgctcttgattctgaagaaaggaactgcacagacattgacgaatgccgcatatctcctgacctctgtggcagaggccagtgtgtgaacacccctggggactttgaatgcaagtgtgacgaaggctatgaaagtggattcatgatgatgaagaactgcatggatattgatgagtgtcagagagatcctctcctatgccgaggtggtgtttgccataacacagagggaagttaccgctgtgaatgcccgcctggccatcagctgtcccccaacatctccgcgtgtatcgacatcaatgaatgtgagctgagtgcacacctgtgccccaatggccgttgcgtgaacctcatagggaagtatcagtgtgcctgcaaccctggctaccattcaactcccgataggctattttgtgttgacattgatgaatgcagcataatgaatggtggttgtgaaaccttctgcacaaactctgaaggcagctatgaatgtagctgtcagccgggatttgcactaatgcctgaccagagatcatgcaccgacatcgatgagtgtgaagataatcccaatatctgtgatggtggtcagtgcacaaatatccctggagagtacaggtgcttgtgttatgatggattcatggcatctgaagacatgaagacttgtgtagatgtcaatgagtgtgacctgaatccaaatatctgcctaagtgggacctgtgaaaacacgaaaggctcatttatctgccactgtgatatgggctactccggcaaaaaaggaaaaactggctgtacagacatcaatgaatgtgaaattggagcacacaactgtggcaaacatgctgtatgtaccaatacagcaggaagcttcaaatgtagctgcagtcccgggtggattggagatggcattaagtgcactgatctggacgaatgttccaatggaacccatatgtgcagccagcatgcagactgcaagaataccatgggatcttaccgctgtctgtgcaaggaaggatacacaggtgatggcttcacttgtacagaccttgatgagtgctctgagaacctgaatctctgtggcaatggccagtgcctcaatgcaccaggaggataccgctgtgaatgcgacatgggcttcgtgcccagtgctgacgggaaagcctgtgaagatattgatgagtgctcccttccgaacatctgtgtctttggaacttgccacaacctccctggcctgttccgctgtgagtgtgagataggctacgaactggacagaagcggcgggaactgcacagatgtgaatgaatgcctggatccaaccacgtgcatcagtgggaactgtgtcaacactccaggcagctatatctgtgactgcccacctgattttgaactgaacccaactcgagttggctgtgttgatacccgctctggaaattgctatttggatattcgacctcgaggagacaatggagatacagcctgcagcaatgaaattggagttggtgtttccaaagcttcctgctgctgttctctgggtaaagcctggggtactccttgtgagatgtgtcctgctgtgaacacatccgagtacaaaattctttgtcctggaggggaaggtttccgaccaaatcctatcaccgttatattggaagatattgatgagtgccaggagctaccagggctgtgccaaggaggaaaatgtatcaacacctttgggagtttccagtgccgctgtccaaccggctactacctgaatgaagatacacgagtgtgtgatgatgtgaatgaatgtgagactcctggaatctgtggtccagggacatgttacaacaccgttggcaactacacctgtatctgtcctccagactacatgcaagtgaatgggggaaataattgcatggatatgagaagaagtttgtgctacagaaactactatgctgacaaccagacctgtgatggagaattgttattcaacatgaccaagaagatgtgctgctgttcctacaacattggccgggcgtggaacaagccctgtgaacagtgtcccatcccaagtacagatgagtttgctacactctgtggaagtcaaaggccaggctttgtcatcgacatttataccggtttacccgttgatattgatgagtgccgggagatcccaggggtctgtgaaaatggagtgtgtatcaacatggttggcagcttccgatgtgaatgtccagtgggattcttctataatgacaagttgttggtttgtgaagatattgacgagtgtcagaacggcccagtgtgccagcgcaacgccgaatgcatcaacactgcaggcagctaccgctgtgactgtaagcccggctaccgcttcacctccacaggacagtgcaatgatcgtaatgaatgtcaagaaatccccaatatatgcagtcatgggcagtgcattgacacagttggaagcttttattgcctttgccacactggttttaaaacaaatgatgaccaaaccatgtgcttggacataaatgaatgtgaaagagatgcctgtgggaatggaacttgccggaacacaattggttccttcaactgccgctgcaatcatggtttcatcctttctcacaacaatgactgtatagatgttgatgaatgtgcaagtggaaatgggaatctttgcagaaatggccaatgcattaatacagtggggtctttccagtgccagtgcaatgaaggctatgaggtggctccagatgggaggacctgtgtggatatcaatgaatgtcttctagaacccagaaaatgtgcaccaggtacctgtcaaaacttggatgggtcctacagatgcatttgcccacctggatacagtcttcaaaatgagaagtgtgaagatattgatgagtgtgtcgaagagccagaaatttgtgccctgggcacatgcagtaacactgaaggcagcttcaaatgtctgtgtccagaagggttttccttgtcctccagtggaagaaggtgccaagatttgcgaatgagctactgttatgcgaagtttgaaggaggaaagtgttcatcacccaaatccagaaatcactccaagcaggaatgctgctgtgccttgaagggagaaggctggggagacccctgcgagctctgccccacggaacctgatgaggccttccgccagatatgtccttatggaagtgggatcatcgtgggacctgatgattcagcagttgatatggacgaatgcaaagaacccgatgtctgtaaacatggacagtgcatcaatacagatggttcctatcgctgcgagtgtccctttggttatattctagcagggaatgaatgtgtagatactgatgaatgttctgttggcaatccttgtggaaatggaacctgcaagaatgtgattggaggttttgaatgcacctgcgaggagggatttgagcccggtccaatgatgacatgtgaagatataaatgaatgtgcccagaatcctctgctctgtgccttccgatgtgtgaacacttatgggtcatatgaatgcaaatgtcccgtgggatatgtgctcagagaagaccgtaggatgtgcaaagatgaggatgagtgtgaagagggaaaacatgactgtactgaaaaacaaatggaatgcaagaacctcattggcacatatatgtgcatctgtggacccgggtatcagcggagacctgatggagaaggctgtgtagatgagaatgaatgtcagacgaagccagggatctgtgagaatgggcgctgcctcaacacccgtgggagctacacctgtgagtgtaatgatgggtttaccgccagccccaaccaggacgagtgccttgacaatcgggaagggtactgcttcacagaggtgctacaaaacatgtgtcagatcggctccagcaacaggaaccccgtcaccaaatcggaatgctgctgtgacggagggagaggctggggtccccactgtgagatctgccctttccaggggactgtggctttcaagaaactctgtccccatggccgaggattcatgaccaatggagcagatatcgatgaatgcaaggttattcacgatgtttgccgaaatggggaatgtgtcaatgacagaggatcatatcattgcatttgtaaaactgggtacactccagatataactgggacttcctgtgtagatctgaacgagtgcaaccaggctcccaaaccctgcaattttatctgcaaaaacacagaagggagttaccagtgttcatgcccgaaaggctacattctgcaagaggatggaaggagctgcaaagatcttgatgagtgtgcaaccaagcaacacaactgccagttcctatgtgttaacaccattggcggcttcacatgcaaatgtcctcccggatttacccaacaccatacgtcctgcattgataacaatgaatgcacctctgacatcaatctgtgcgggtctaagggcatttgccagaacactcctggaagcttcacctgtgaatgccagcggggattctcacttgatcagaccggctccagctgtgaagacgtggacgagtgtgagggtaaccaccgctgccagcatggctgccagaacatcattgggggctacaggtgcagctgcccccagggctacctccagcactaccagtggaaccagtgtgttgatgaaaacgaatgcctcagcgctcacatctgcggaggagcctcctgtcacaacaccctggggagctacaagtgcatgtgtcccgccggcttccagtatgaacagttcagtggaggatgccaagacatcaatgaatgtggctctgcgcaggccccctgcagctatggctgttccaataccgagggcggttacctgtgtggctgtccacctggttacttccgcataggccaagggcactgtgtttctggaatgggcatgggccgaggaaacccagagccacctgtcagtggtgaaatggatgacaattcactctccccagaggcttgttacgagtgtaagatcaatggctaccccaaacggggcaggaaacggagaagcacaaacgaaactgatgcctccaatatcgaggatcagtctgagacagaagccaatgtgagtcttgcaagttgggatgttgagaagacagccatctttgctttcaatatttcccacgtcagtaacaaggttcgaatcctagaactccttccagctcttacaactctgacgaatcacaacagatacttgatcgaatctggaaatgaagatggcttctttaaaatcaaccaaaaggaagggatcagctacctccacttcacaaagaagaagccagtggctggaacctattcattacaaatcagtagtactccactttataaaaagaaagaacttaaccaactagaagacaaatatgacaaagactacctcagtggtgaactgggtgataatctgaagatgaaaatccaggttttgcttcattaattcaccatccagagaccaaataattaaaagaaaaacaaatatagataggtagaactatattttcccccaatcagaatcatcatatcataggtacaatctttcaccaagtaaatttgtataaataagcactattctttgtattaccaaagcaaggtacaggtgactaccctagttcaaaacaaccactttctcaggcttctcatgtgtgtagctaagctaccttgtcatatgtgttgattcttgaaaactgggacgtgtatttccattgggggttggccatttatgctgacatgccatccttccagcaaacgtacgggaatgtgctttcaattgatggactactctattttttgcaaatttgtaaactttgcttctccaaatacaagtactaggttgtccatttatggtacctatttggtgctagtaaattttcaaactagatttataaatgcactgtaatatgtacacaacttagaaaccaaattacaagtattcagttccaatacttcattaatttcaatcaaccaaagttagttcagtagcttatctcagttatgagtataatacattacatgtaaattaagtgtgtgtatactgtaatcgtgctattttttatcattgaaacatttataaactagaataataatgcccttaatgtgagggtttgtaatggtgcttattaagaccaaagacttgttaaatgtatacaccaagtggtaatgaaatttcggtgactggcccacacgtgcatagaggtctgggaggaccaggaaacagcctcagtggccagaggatcaccagtgcatccttcatcacagcatgtgcaatatgccaagattaccctcggtcattcctgtcaacaaggggtcaatgtcataaatgtcacaataaaacaatctcttcttttttttagtttaccccttggctttgtgttcttgcatggatttggggttggaggggccattccggaggctaaataaagtctcctggatttaaatta

SEQ ID NO: 3 - DNA, 2881 bp, Homo sapiens
acagaagtgctagaagccagtgctcgtgaactaaggagaaaaagaacagacaagggaacagcctggacatggcatcagagatccacatgacaggcccaatgtgcctcattgagaacactaatgggcgactgatggcgaatccagaagctctgaagatcctttctgccattacacagcctatggtggtggtggcaattgtgggcctctaccgcacaggcaaatcctacctgatgaacaagctggctggaaagaaaaagggcttctctctgggctccacggtgcagtctcacactaaaggaatctggatgtggtgtgtgccccaccccaagaagccaggccacatcctagttctgctggacaccgagggtctgggagatgtagagaagggtgacaaccagaatgactcctggatcttcgccctggccgtcctcctgagcagcaccttcgtgtacaatagcataggaaccatcaaccagcaggctatggaccaactgtactatgtgacagagctgacacatagaatccgatcaaaatcctcacctgatgagaatgagaatgaggttgaggattcagctgactttgtgagcttcttcccagactttgtgtggacactgagagatttctccctggacttggaagcagatggacaacccctcacaccagatgagtacctgacatactccctgaagctgaagaaaggtaccagtcaaaaagatgaaacttttaacctgcccagactctgtatccggaaattcttcccaaagaaaaaatgctttgtctttgatcggcccgttcaccgcaggaagcttgcccagctcgagaaactacaagatgaagagctggaccccgaatttgtgcaacaagtagcagacttctgttcctacatctttagtaattccaaaactaaaactctttcaggaggcatccaggtcaacgggcctcgtctagagagcctggtgctgacctacgtcaatgccatcagcagtggggatctgccgtgcatggagaacgcagtcctggccttggcccagatagagaactcagctgcagtgcaaaaggctattgcccactatgaacagcagatgggccagaaggtgcagctgcccacagaaagcctccaggagctgctggacctgcacagggacagtgagagagaggccattgaagtcttcatcaggagttccttcaaagatgtggaccatctatttcaaaaggagttagcggcccagctagaaaaaaagcgggatgacttttgtaaacagaatcaggaagcatcatcagatcgttgctcaggtttacttcaggtcattttcagtcctctagaagaagaagtgaaggcgggaatttattcgaaaccagggggctatcgtctctttgttcagaagctacaagacctgaagaaaaagtactatgaggaaccgaggaaggggatacaggctgaagagattctgcagacatacttgaaatccaaggagtctatgactgatgcaattctccagacagaccagactctcacagaaaaagaaaaggagattgaagtggaacgtgtgaaagctgagtctgcacaggcttcagcaaaaatgttgcaggaaatgcaaagaaagaatgagcagatgatggaacagaaggagaggagttatcaggaacacttgaaacaactgactgagaagatggagaacgacagggtccagttgctgaaagagcaagagaggaccctcgctcttaaacttcaggaacaggagcaactactaaaagagggatttcaaaaagaaagcagaataatgaaaaatgagatacaggatctccagacgaaaatgagacgacgaaaggcatgtaccataagctaaagaccagagccttcctgtcacccctaaccaaggcataattgaaacaattttagaatttggaacaagcgtcactacatttgataataattagatcttgcatcataacaccaaaagtttataaaggcatgtggtacaatgatcaaaatcatgttttttcttaaaaaaaaaaaaaagactgtaaattgtgcaacaaagatgcatttacctctgtatcaactcaggaaatctcataagctggtaccactcaggagaagtttattcttccagatgaccagcagtagacaaatggatactgagcagagtcttaggtaaaagtcttgggaaatatttgggcattggtctggccaagtctacaatgtcccaatatcaaggacaaccaccctagcttcttagtgaagacaatgtacagttatccattagatcaagactacacggtctatgagcaataatgtgatttctggacattgcccatgtataatcctcactgatgatttcaagctaaagcaaaccaccttatacagagatctagaatctctttatgttctccagaggaaggtggaagaaaccatgggcaggagtaggaattgagtgataaacaattgggctaatgaagaaaacttctcttattgttcagttcatccagattataacttcaatgggacactttagaccattagacaattgacactggattaaacaaattcacataatgccaaatacacaatgtatttatagcaacgtataatttgcaaagatggactttaaaagatgctgtgtaactaaactgaaataattcaattacttattatttagaatgttaaagcttatgatagtcttttctaattcttaacactcatacttgaaatctttccgagtttccccagaagagaatatgggattttttttgacatttttgacccatttaataatgctcttgtgtttacctagtatatgtagactttgtcttatgtgtcaaaagtcctaggaaagtggttgatgtttcttatagcaattaaaaattatttttgaactga

SEQ ID NO: 4 - DNA, 597 bp, Homo sapiens
agctgaagttgaggatctcttactctctaagccacggaattaacccgagcaggcatggaggcctctgctctcacctcatcagcagtgaccagtgtggccaaagtggtcagggtggcctctggctctgccgtagttttgcccctggccaggattgctacagttgtgattggaggagttgtggccatggcggctgtgcccatggtgctcagtgccatgggcttcactgcggcgggaatcgcctcgtcctccatagcagccaagatgatgtccgcggcggccattgccaatgggggtggagttgcctcgggcagccttgtgggtactctgcagtcactgggagcaactggactctccggattgaccaagttcatcctgggctccattgggtctgccattgcggctgtcattgcgaggttctactagctccctgcccctcgccctgcagagaagagaaccatgccaggggagaaggcacccagccatcctgacccagcgaggagccaactatcccaaatatacctgggtgaaatataccaaattctgcatctccagaggaaaataagaaataaagatgaattgttgcaactcttaaaaaaa

SEQ ID NO: 5 - DNA, 7391 bp, Homo sapiens
gctgcgcagcgctggctgctggctggcctcgcggagacgccgaacggacgcggccggcgccggcttgtgggctcgccgcctgcagccatgaccctcgcagcctgtccctcggcctcggcccgggacgtctaaaatcccacacagtcgcgcgcagctgctggagagccggccgctgccccctcgtcgccgcatcacactcccgtcccgggagctgggagcagcgcgggcagccggcgcccccgtgcaaactgggggtgtctgccagagcagccccagccgctgccgctgctacccccgatgctggccatggcctggcggggcgcagggccgagcgtcccgggggcgcccgggggcgtcggtctcagtctggggttgctcctgcagttgctgctgctcctggggccggcgcggggcttcggggacgaggaagagcggcgctgcgaccccatccgcatctccatgtgccagaacctcggctacaacgtgaccaagatgcccaacctggttgggcacgagctgcagacggacgccgagctgcagctgacaactttcacaccgctcatccagtacggctgctccagccagctgcagttcttcctttgttctgtttatgtgccaatgtgcacagagaagatcaacatccccattggcccatgcggcggcatgtgtctttcagtcaagagacgctgtgaacccgtcctgaaggaatttggatttgcctggccagagagtctgaactgcagcaaattcccaccacagaacgaccacaaccacatgtgcatggaagggccaggtgatgaagaggtgcccttacctcacaaaacccccatccagcctggggaagagtgtcactctgtgggaaccaattctgatcagtacatctgggtgaaaaggagcctgaactgtgtgctcaagtgtggctatgatgctggcttatacagccgctcagccaaggagttcactgatatctggatggctgtgtgggccagcctgtgtttcatctccactgccttcacagtactgaccttcctgatcgattcttctaggttttcctaccctgagcgccccatcatatttctcagtatgtgctataatatttatagcattgcttatattgtcaggctgactgtaggccgggaaaggatatcctgtgattttgaagaggcagcagaacctgttctcatccaagaaggacttaagaacacaggatgtgcaataattttcttgctgatgtacttttttggaatggccagctccatttggtgggttattctgacactcacttggtttttggcagcaggactcaaatggggtcatgaagccattgaaatgcacagctcttatttccacattgcagcctgggccatccccgcagtgaaaaccattgtcatcttgattatgagactggtggatgcagatgaactgactggcttgtgctatgttggaaaccaaaatctcgatgccctcaccgggttcgtggtggctcccctctttacttatttggtcattggaactttgttcattgctgcaggtttggtggccttgttcaaaattcggtcaaatcttcaaaaggatgggacaaagacagacaagttagaaagactgatggtcaagattggggtgttctcagtactgtacacagttcctgcaacgtgtgtgattgcctgttatttttatgaaatctccaactgggcactttttcggtattctgcagatgattccaacatggctgttgaaatgttgaaaatttttatgtctttgttggtgggcatcacttcaggcatgtggatttggtctgccaaaactcttcacacgtggcagaagtgttccaacagattggtgaattctggaaaggtaaagagagagaagagaggaaatggttgggtgaagcctggaaaaggcagtgagactgtggtataaggctagtcagcctccatgctttcttcattttgaaggggggaatgccagcattttggaggaaattctactaaaagttttatgcagtgaatctcagtttgaacaaactagcaacaattaagtgacccccgtcaacccactgcctcccaccccgaccccagcatcaaaaaaccaatgattttgctgcagactttggaatgatccaaaatggaaaagccagttagaggctttcaaagctgtgaaaaatcaaaacgttgatcactttagcaggttgcagcttggagcgtggaggtcctgcctagattccaggaagtccagggcgatactgttttcccctgcagggtgggatttgagctgtgagttggtaactagcagggagaaatattaacttttttaaccctttaccattttaaatactaactgggtctttcagatagcaaagcaatctataaacactggaaacgctgggttcagaaaagtgttacaagagttttatagtttggctgatgtaacataaacatcttctgtggtgcgctgtctgctgtttagaactttgtggactgcactcccaagaagtggtgttagaatctttcagtgcctttgtcataaaacagttatttgaacaaacaaaagtactgtactcacacacataaggtatccagtggatttttcttctctgtcttcctctcttaaatttcaacatctctcttcttggctgctgctgttttcttcattttatgttaatgactcaaaaaaggtatttttatagaatttttgtactgcagcatgcttaaagaggggaaaaggaagggtgattcactttctgacaatcacttaattcagaggaaaatgagatttactaagttgacttacctgacggaccccagagacctattgcattgagcagtggggacttaatatattttacttgtgtgattgcatctatgcagacgccagtctggaagagctgaaatgttaagtttcttggcaactttgcattcacacagattagctgtgtaatttttgtgtgtcaattacaattaaaagcacattgttggaccatgacatagtatactcaactgactttaaaactatggtcaacttcaacttgcattctcagaatgatagtgcctttaaaaatttttttattttttaaagcataagaatgttatcagaatctggtctacttaggacaatggagactttttcagttttataaagggaactgaggacagctaatccaactacttggtgcgtaattgtttcctagtaattggcaaaggctccttgtaagatttcactggaggcagtgtggcctggagtatttatatggtgcttaatgaatctccagaatgccagccagaagcctgattggttagtagggaataaagtgtagaccatatgaaatgaactgcaaactctaatagcccaggtcttaattgcctttagcagaggtatccaaagcttttaaaatttatgcatacgttcttcacaagggggtacccccagcagcctctcgaaaattgcacttctcttaaaactgtaactggcctttctcttaccttgccttaggccttctaatcatgagatcttggggacaaattgactatgtcacaggttgctctccttgtaactcatacctgtctgcttcagcaactgctttgcaatgacatttatttattaattcatgccttaaaaaaataggaagggaagcttttttttttctttttttttttttcaatcacactttgtggaaaaacatttccagggactcaaaattccaaaaaggtggtcaaattctggaagtaagcatttcctcttttttaaaaatttggtttgagccttatgcccatagtttgacatttccctttcttctttcctttttgtttttgtgtggttcttgagctctctgacatcaagatgcatgtaaagtcgattgtatgttttggaaggcaaagtcttggcttttgagactgaagttaagtgggcacaggtggcccctgctgctgtgcccagtctgagtaccttggctagactctaggtcaggctccaggagcatgagaattgatccccagaagaaccattttaactccatctgatactccattgcctatgaaatgtaaaatgtgaactccctgtgctgcttgtagacagttcccataactgtccacggccctggagcacgcacccaggggcagagcctgcccttactcacgctctgctctggtgtcttgggagttgtgcagggactctggcccaggcaggggaaggaagaccaggcggtaggggactggtcttgctgttagagtatagaggtttgtaatgcagttttcttcataatgtgtcagtgattgtgtgaccaaggcagcatctagcagaaagccaggcatggagtaggtgatcgatacttgtcaatgactaaataataacaataaaagagcacttgggtgaatctgggcacctgatttctgagttttgagttctggagctagtgttttgacaatgctttgggttttgacatgccttttccacaaatctcttgccttttcagggcaaagtgtatttgatcagaagtggccatttggattagtagccttagcaatgctacagggttataggcctctcctttcacattccagacaatggagagtgtttatggtttcaggaaaagaactttgtggctgaggggtcagttaccagtgaccttcaatcaactccatcacttcttaaatcggtatttgttaaaaaaatcagttattttatttattgagtgccgactgtagtaaagccctgaaatagataatctctgttcttctaactgatctaggatggggacgcacccaggtctgctgaactttactgttcctctgggaaaggagcagggacctctggaattcccatctgtttcactgtctccattccataaatctcttcctgtgtgagccaccacacccagcctgggtctctctacttttaacacatctctcatccctttcccaggattccttccaagtcagttacaggtggttttaacagaaagcatcagctctgcttcgtgacagtctctggagaaatcccttaggaagactatgagagtaggccacaaggacatgggcccacacatctgctttggctttgccggcaattcagggcttggggtattccatgtgacttgtataggtatatttgaggacagcatcttgctagagaaaaggtgagggttgtttttctttctctgaaacctacagtaaatgggtatgattgtagcttcctcagaaatcccttggcctccagagattaaacatggtgcaatggcacctctgtccaacctcctttctggtagattcctttctcctgcttcatataggccaaacctcagggcaagggaacatgggggtagagtggtgctggccagaaccatctgcttgagctacttggttgattcatatcctctttcctttatggagacccatttcctgatctctgagactgttgctgaactggcaacttacttgggcctgaaactggagaaggggtgacatttttttaatttcagagatgctttctgattttcctctcccaggtcactgtctcacctgcactctccaaactcaggttccgggaagcttgtgtgtctagatactgaattgagattctgttcagcaccttttagctctatactctctggctcccctcatcctcatggtcactgaattaaatgcttattgtattgagaaccaagatgggacctgaggacacaaagatgagctcaacagtctcagccctagaggaatagactcagggatttcaccaggtcggtgcagtatttgatttctggtgaggtgaccacagctgcagttagggaagggagccattgagcacagactttggaaggaaccttttttttgttgtttgtttgtttgtttgtttgtttgtttgtttgagacagggtcttgctctgtcacccaggctggggcgcaatggcacgatcttggctcactgcaacctctgcctcctgggttcaagtgattctcctgccacagcctcctgaggagctgggactacaggtgcgtgctaccacgcccagctacttctgtatttttagtagagacggggtttcactgtgttggccaggctggtctcgaactcctgacctcatgatctgcccgcctcagcctcccaaagtgctgggattacaagtgtgagccaccacacctggcctggaaggaacctcttaaaatcagtttacgtcttgtattttgttctgtgatggaggacactggagagagttgctattccagtcaatcatgtcgagtcactggactctgaaaatcctattggttcctttattttatttgagtttagagttcccttctgggtttgtattatgtctggcaaatgacctgggttatcacttttcctccagggttagatcatagatcttggaaactccttagagagcattttgctcctaccaaggatcagatactggagccccacataatagatttcatttcactctagcctacatagagctttctgttgctgtctcttgccatgcacttgtgcggtgattacacacttgacagtaccaggagacaaatgacttacagatcccccgacatgcctcttccccttggcaagctcagttgccctgatagtagcatgtttctgtttctgatgtaccttttttctcttcttctttgcatcagccaattcccagaatttccccaggcaatttgtagaggacctttttggggtcctatatgagccatgtcctcaaagcttttaaacctccttgctctcctacaatattcagtacatgaccactgtcatcctagaaggcttctgaaaagaggggcaagagccactctgcgccacaaaggttgggtccatcttctctccgaggttgtgaaagttttcaaattgtactaataggctggggccctgacttggctgtgggctttgggaggggtaagctgctttctagatctctcccagtgaggcatggaggtgtttctgaattttgtctacctcacagggatgttgtgaggcttgaaaaggtcaaaaaatgatggccccttgagctctttgtaagaaaggtagatgaaatatcggatgtaatctgaaaaaaagataaaatgtgacttcccctgctctgtgcagcagtcgggctggatgctctgtggcctttcttgggtcctcatgccaccccacagctccaggaaccttgaagccaatctgggggactttcagatgtttgacaaagaggtaccaggcaaacttcctgctacacatgccctgaatgaattgctaaatttcaaaggaaatggaccctgcttttaaggatgtacaaaagtatgtctgcatcgatgtctgtactgtaaatttctaatttatcactgtacaaagaaaaccccttgctatttaattttgtattaaaggaaaataaagttttgtttgttaaaaaaaaa

SEQ ID NO: 6 - DNA, 2172 bp, Homo sapiens
agatacccccggagctccagccgcgcggatcgcgcgctcccgccgctctgcccctaaacttctgccgtagctccctttcaagccagcgaatttattccttaaaaccagaaactgaacctcggcacgggaaaggagtccgcggaggagcaaaaccacagcagagcaagaagagcttcagagagcagccttcccggagcaccaactccgtgtcgggagtgcagaaaccaacaagtgagagggcgccgcgttcccggggcgcagctgcgggcggcgggagcaggcgcaggaggaggaagcgagcgcccccgagccccgagcccgagtccccgagcctgagccgcaatcgctgcggtactctgctccggattcgtgtgcgcgggctgcgccgagcgctgggcaggaggcttcgttttgccctggttgcaagcagcggctgggagcagccggtccctggggaatatgcggcgcgcgtggatcctgctcaccttgggcttggtggcctgcgtgtcggcggagtcgagagcagagctgacatctgataaagacatgtaccttgacaacagctccattgaagaagcttcaggagtgtatcctattgatgacgatgactacgcttctgcgtctggctcgggagctgatgaggatgtagagagtccagagctgactacatctcgaccacttccaaagatactgttgactagtgctgctccaaaagtggaaaccacgacgctgaatatacagaacaagatacctgctcagacaaagtcacctgaagaaactgataaagagaaagttcacctctctgactcagaaaggaaaatggacccagccgaagaggatacaaatgtgtatactgagaaacactcagacagtctgtttaaacggacagaagtcctagcagctgtcactgctggtggagttattggctttctctttgcaatttttcttatcctgctgttggtgtatcgcatgagaaagaaggatgaaggaagctatgaccttggagaacgcaaaccatccagtgctgcttatcagaaggcacctactaaggagttttatgcgtaaaactccaacttagtgtctctatttatgagatcactgaacttttcaaaataaagcttttgcatagaataatgaagatctttgttttttgttttcattaaagagccattctggcactttaatgataaaatcccattgtatttaaaacatttcatgtatttctttagaacaacataaaattaaaatttaacatctgcagtgttctgtgaatagcagtggcaaaatattatgttatgaaaaccctcgatgttcatggaattggtttaaacttttatgcgcaaatacaaaatgattgtctttttcctatgactcaaagatgaaagctgtttcatttgtgtcagcatgtctcagattgaccttaccaagttggtcttactttgttaatttatctgttgtccccttcctctcctctgccctcccttcttgtgcccttaaaaccaaaccctatgccttttgtagctgtcatggtgcaatttgtctttggaaaattcagataatggtaatttagtgtatatgtgattttcaaatatgtaaactttaacttccactttgtataaatttttaagtgtcagactatccattttacacttgctttatttttcattacctgtagctttgggcagatttgcaacagcaaattaatgtgtaaaattggattattactacaaaaccgtttagtcatatctatctaatcagatcttcttttgggaggatttgatgtaagttactgacgagcctcagcaaacccaaagatgttaacagtattttaagaagttgctgcagattcctttggccactgtatttgttaatttcttgcaatttgaaggtacgagtagaggtttaaagaaaaatcagtttttgttcttaaaaatgcatttaagttgtaaacgtctttttaagcctttgaagtgcctctgattctatgtaacttgttgcagactggtgttaatgagtatatgtaacagtttaaaaaaaaagttggtattttataagcacagacaattctaatggtaacttttgtagtcttatgaatagacataaattgtaatttgggaacataaaaactactgaataaatcatgtggcctaatattgaaaaaaaaaaaaaaaa

SEQ ID NO: 7 - DNA, 4396 bp, Homo sapiens
ggagggggtccttgccaggcctggggcggccgggggcggtcctgggctcccctccgtcccgcctccaggcctcggggcctggctggccgacgtggcgttggcggcgctgcgcgcgggagggcagggcaggagggacagaggcgggggcgggccggaaagtttgtccggcggcagcggcgttggggactccggcgggggatgcgcgcccggcccctcagcgcccccagcacgccgccgagtcccgctcgccatgggccactccccacctgtcctgcctttgtgtgcctctgtgtctttgctgggtggcctgacctttggttatgaactggcagtcatatcaggtgccctgctgccactgcagcttgactttgggctaagctgcttggagcaggagttcctggtgggcagcctgctcctgggggctctcctcgcctccctggttggtggcttcctcattgactgctatggcaggaagcaagccatcctcgggagcaacttggtgctgctggcaggcagcctgaccctgggcctggctggttccctggcctggctggtcctgggccgcgctgtggttggcttcgccatttccctctcctccatggcttgctgtatctacgtgtcagagctggtggggccacggcagcggggagtgctggtgtccctctatgaggcaggcatcaccgtgggcatcctgctctcctatgccctcaactatgcactggctggtaccccctggggatggaggcacatgttcggctgggccactgcacctgctgtcctgcaatccctcagcctcctcttcctccctgctggtacagatgagactgcaacacacaaggacctcatcccactccagggaggtgaggcccccaagctgggcccggggaggccacggtactcctttctggacctcttcagggcacgcgataacatgcgaggccggaccacagtgggcctggggctggtgctcttccagcaactaacagggcagcccaacgtgctgtgctatgcctccaccatcttcagctccgttggtttccatgggggatcctcagccgtgctggcctctgtggggcttggcgcagtgaaggtggcagctaccctgaccgccatggggctggtggaccgtgcaggccgcagggctctgttgctagctggctgtgccctcatggccctgtccgtcagtggcataggcctcgtcagctttgccgtgcccatggactcaggcccaagctgtctggctgtgcccaatgccaccgggcagacaggcctccctggagactctggcctgctgcaggactcctctctacctcccattccaaggaccaatgaggaccaaagggagccaatcttgtccactgctaagaaaaccaagccccatcccagatctggagacccctcagcccctcctcggctggccctgagctctgccctccctgggccccctctgcccgctcgggggcatgcactgctgcgctggaccgcactgctgtgcctgatggtctttgtcagtgccttctcctttgggtttgggccagtgacctggcttgtcctcagcgagatctaccctgtggagatacgaggaagagccttcgccttctgcaacagcttcaactgggcggccaacctcttcatcagcctctccttcctcgatctcattggcaccatcggcttgtcctggaccttcctgctctacggactgaccgctgtcctcggcctgggcttcatctatttatttgttcctgaaacaaaaggccagtcgttggcagagatagaccagcagttccagaagagacggttcaccctgagctttggccacaggcagaactccactggcatcccgtacagccgcatcgagatctctgcggcctcctgaggaatccgtctgcctggaattctggaactgtggctttggcagaccatctccagcatcctgcttcctaggccccagagcacaagttccagctggtcttttgggagtggcccctgcccccaaaggtggtttgcttttgctggggtaaaaaggatgaaagtttgagaatgcccaattcttcattttgggtttcaggccctgaaggttcttgaggatctagtttcatgcctcggtttccccattgacttggacatttttgcagtttttataagaagaatattctatgaagtctttgttgccccatggatttttttcaaagaatctcaggggtaccaatccgggcaggaggtttttcccgatatcacccctaaatccaaatgaggatatcatcttttctaatctcttttttcaactggctgggacattttcggaagggggaagtctctttttttactcttatcattttttttttttgaggtggagtctcattctgttgcccaggctggcctgatcttggctcactgcaacctccacttcctgggttcaagcgattctcctgcctcagcctcctaagtagctgggattacaggcgcgtgccaccacacccagctaatttatttttagcagagatggggtttcactgtgttggccaggctggtcgtgaactcctgagctcaagtgatccacccacctcagcctcccagagtgctaggattacaggccttttgactcttttatctgagttttattgacccctctaattctcttacccagaatatttatccttcaccagcaactctgactctttgacgggaggcctcagttctagtccttggtctgctggtgtcattgctgtaggaatgaccacgggcctcagtttccccatttgtataatgggaagcctgtaccaggtcattcttaagatttctcctgactccagtgagctggaattctaaatgctggtctaggagctgtctccaggatggtgcaggatggctttgcggaaaggagatgggtttggaggccaacaaacctgcttgtcaatattgcctttgcctcttggcagcccttgaacttgagtaaataacaactccctgaacctcagtttcctcatctgcagaatggggataattatgtcccaggggtatatttagaccctgtttcctttcaggagggtccccagctggtccagggcctgggaaatttctacttatcctcattacccaggtccctcctttggaccctgtaaagggtcagggtgaatcagatgggggactgagcaagtagctatgactgcagatcatgtaaggaagggactgacaagaagctcccagatgctggggagaatgaagagctaaaatagatcctaggtgctggatgctttgtcatccatgcgtgcacatatgggtgctggcagagcccccaaggactctggcctctcgagttctcctatcttctccattctagatgcttcccttgtatccagtgatgtgctggagctggctttgccaagcttgtgagagctggttgctacattttcaggatttttacaagttggtaaacacagccattataaaaaattaaatgatttaaatttataattaagtaaattacattaaaacaaaaaaattatactcaaaattcattacttaattttactacctgttactattatctgtgcttttgaggctatttctacatagtaactcttatggagacctaggggagacaccgcgcatctcttcctgattccccactcaatgacatcatgttagtctttggttgcttaactggctgtggggagtgtttttgtatcacaaagattagagaggactacacatcagggcttgatttattgtttgttgattttctagacttcagaacatgctggataaaatgtcagtaatgcaaattaaactttaaagtatgtcttgtttgtagccaatacatggtgtatagcaccaaaaaatggagggattattcttccagtagttgaacactgtcatccgtttcagctgacagctgctcaaatcatttaagaaggagttctgacattcattttcattgttttacttttgtcttcctcactagtgtaaacaaaaatttcaaccagcattcatgccgaacctatacccattcttcagtgcctagctgtacagttatcagggatttttattcgtagtctaattttgtcaaatcatggccaaatcgcagtgatagttgactttggatacaaggtttggcaaaaaaaaaaatattaacaaaatattctgtaagaatcaattggctatatggaatttaggataaagaatatttacaataaagaatatttacaataaagagtttattattatttgtaagttgtgtgcaacaaacataccctttatctctgtaaaatttatacacacaaaaattaacaaaagattctgtaagaattaattggctatatggaatttaggatagaatatttacaataaagagtatttacaataaagagtttgttattatttgtaaaaaaaaaaa

SEQ ID NO: 8 - DNA, 2199 bp, Homo sapiens
gctctccagaggcgggccctgagccggcacctcccctttcggacagctcaagggactcagccaactggctcacgcctccccttcagcttctcttcacgcactccaagatctaaaccgagaatcgaaactaagctggggtccatggagcctgcacccgcccgatctccgaggccccagcaggaccccgcccggccccaggagcccaccatgcctccccccgagaccccctctgaaggccgccagcccagccccagccccagccctacagagcgagcccccgcttcggaggaggagttccagtttctgcgctgccagcaatgccaggcggaagccaagtgcccgaagctgctgccttgtctgcacacgctgtgctcaggatgcctggaggcgtcgggcatgcagtgccccatctgccaggcgccctggcccctaggtgcagacacacccgccctggataacgtctttttcgagagtctgcagcggcgcctgtcggtgtaccggcagattgtggatgcgcaggctgtgtgcacccgctgcaaagagtcggccgacttctggtgctttgagtgcgagcagctcctctgcgccaagtgcttcgaggcacaccagtggttcctcaagcacgaggcccggcccctagcagagctgcgcaaccagtcggtgcgtgagttcctggacggcacccgcaagaccaacaacatcttctgctccaaccccaaccaccgcacccctacgctgaccagcatctactgccgaggatgttccaagccgctgtgctgctcgtgcgcgctccttgacagcagccacagtgagctcaagtgcgacatcagcgcagagatccagcagcgacaggaggagctggacgccatgacgcaggcgctgcaggagcaggatagtgcctttggcgcggttcacgcgcagatgcacgcggccgtcggccagctgggccgcgcgcgtgccgagaccgaggagctgatccgcgagcgcgtgcgccaggtggtagctcacgtgcgggctcaggagcgcgagctgctggaggctgtggacgcgcggtaccagcgcgactacgaggagatggccagtcggctgggccgcctggatgctgtgctgcagcgcatccgcacgggcagcgcgctggtgcagaggatgaagtgctacgcctcggaccaggaggtgctggacatgcacggtttcctgcgccaggcgctctgccgcctgcgccaggaggagccccagagcctgcaagctgccgtgcgcaccgatggcttcgacgagttcaaggtgcgcctgcaggacctcagctcttgcatcacccaggggaaagatgcagctgtatccaagaaagccagcccagaggctgccagcactcccagggaccctattgacgttgacctgcccgaggaggcagagagagtgaaggcccaggttcaggccctggggctggctgaagcccagcctatggctgtggtacagtcagtgcccggggcacaccccgtgccagtgtacgccttctccatcaaaggcccttcctatggagaggatgtctccaatacaacgacagcccagaagaggaagtgcagccagacccagtgccccaggaaggtcatcaagatggagtctgaggaggggaaggaggcaaggttggctcggagctccccggagcagcccaggcccagcacctccaaggcagtctcaccaccccacctggatggaccgcctagccccaggagccccgtcataggaagtgaggtcttcctgcccaacagcaaccacgtggccagtggcgccggggaggcagaggaacgcgttgtggtgatcagcagctcggaagactcagatgccgaaaactcgtcctcccgagagctggatgacagcagcagtgagtccagtgacctccagctggaaggccccagcaccctcagggtcctggacgagaaccttgctgacccccaagcagaagacagacctctggttttctttgacctcaagattgacaatgaaagtgggttctcctggggctacccccacccctttctaatttagtctctgagtcccaaaaagaagtgcaggcagagccatctgccaggcccaggagagctctgagctctggccaacaactgcagccaggctgggcagagcactccggctcacctgggctcctggcgtgtcatttgctggcttgaataaagatgtcgcctt

SEQ ID NO: 9 - DNA, 2897 bp, Homo sapiens
ggaattccgcgccgccttcccccatctcttcctcgtcctcctcctgctcccggggcggagagcggggccccggcggcgccagcaactgcgggacgcctcagctcgacacggaggcggcggccggacccccggcccgctcgctgctgctcagttcctacgcttcgcatcccttcggggctccccacggaccttcggcgcctggggtcgcgggccccgggggcaacctgtcgagctgggaggacttgctgctgttcactgacctcgaccaagccgcgaccgccagcaagctgctgtggtccagccgcggcgccaagctgagccccttcgcacccgagcagccggaggagatgtaccagaccctcgccgctctctccagccagggtccggccgcctacgacggcgcgcccggcggcttcgtgcactctgcggccgcggcggcagcagccgcggcggcggccagctccccggtctacgtgcccaccacccgcgtgggttccatgctgcccggcctaccgtaccacctgcaggggtcgggcagtgggccagccaaccacgcgggcggcgcgggcgcgcaccccggctggcctcaggcctcggccgacagccctccatacggcagcggtggcggcgcggctggcggcggggccgcggggcctggcggcgctggctcagccgcggcgcacgtctcggcgcgcttcccctactctcccagcccgcccatggccaacggcgccgcgcgggagccgggaggctacgcggcggcgggcagtgggggcgcgggaggcgtgagcggcggcggcagtagcctggcggccatgggcggccgcgagccccagtacagctcgctgtcggccgcgcggccgctgaacgggacgtaccaccaccaccaccaccaccaccaccaccatccgagcccctactcgccctacgtgggggcgccactgacgcctgcctggcccgccggacccttcgagaccccggtgctgcacagcctgcagagccgcgccggagccccgctcccggtgccccggggtcccagtgcagacctgctggaggacctgtccgagagccgcgagtgcgtgaactgcggctccatccagacgccgctgtggcggcgggacggcaccggccactacctgtgcaacgcctgcgggctctacagcaagatgaacggcctcagccggcccctcatcaagccgcagaagcgcgtgccttcatcacggcggcttggattgtcctgtgccaactgtcacaccacaactaccaccttatggcgcagaaacgccgagggtgaacccgtgtgcaatgcttgtggactctacatgaaactccatggggtgcccagaccacttgctatgaaaaaagagggaattcaaaccaggaaacgaaaacctaagaacataaataaatcaaagacttgctctggtaatagcaataattccattcccatgactccaacttccacctcttctaactcagatgattgcagcaaaaatacttcccccacaacacaacctacagcctcaggggcgggtgccccggtgatgactggtgcgggagagagcaccaatcccgagaacagcgagctcaagtattcgggtcaagatgggctctacataggcgtcagtctcgcctcgccggccgaagtcacgtcctccgtgcgaccggattcctggtgcgccctggccctggcctgagcccacgccgccaggaggcagggagggctccgccgcgggcctcactccactcgtgtctgcttttgtgcagcggtccagacagtggcgactgcgctgacagaacgtgattctcgtgcctttattttgaaagagatgtttttcccaagaggcttgctgaaagagtgagagaagatggaagggaagggccagtgcaactgggcgcttgggccactccagccagcccgcctccggggcggaccctgctccacttccagaagccaggactaggacctgggccttgcctgctatggaatattgagagagattttttaaaaaagattttgcattttgtccaaaatcatgtgcttcttctgatcaattttggttgttccagaatttcttcataccttttccacatccagatttcatgtgcgttcatggagaagatcacttgaggccatttggtacacatctctggaggctgagtcggttcatgaggtctcttatcaaaaatattactcagtttgcaagactgcattgtaactttaacatacactgtgactgacgtttctcaaagttcatattgtgtggctgatctgaagtcagtcggaatttgtaaacagggtagcaaacaagatatttttcttccatgtatacaataatttttttaaaaagtgcaatttgcgttgcagcaatcagtgttaaatcatttgcataagatttaacagcattttttataatgaatgtaaacattttaacttaatggtacttaaaataatttaaaagaaaaatgttaacttagacattcttatgcttcttttacaactacatcccattttatatttccaattgttaaagaaaaatatttcaagaacaaatcttctctcaggaaaattgcctttctctatttgttaagaatttttatacaagaacaccaatataccccctttattttactgtggaatatgtgctggaaaaattgcaacaacactttactacctaacggatagcatttgtaaatactctaggtatctgtaaacactctgatgaagtctgtatagtgtgactaacccacaggcaggttggtttacattaattttttttttgaatgggatgtcctatggaaacctatttcaccagagttttaaaaataaaaagggtattgttttgtcttctgtaaaaaaaaaaaaaaaaaaaaaaaaaaaaaaaaaaaaaaaaaaa

SEQ ID NO: 10 - DNA, 2153 bp, Homo sapiens
aagactgcgagctccccgcaccccctcgcactccctctggccggcccagggcgccttcagcccaacctccccagccccacgggcgccacggaacccgctcgatctcgccgccaactggtagacatggagacccctgcctggccccgggtcccgcgccccgagaccgccgtcgctcggacgctcctgctcggctgggtcttcgcccaggtggccggcgcttcaggcactacaaatactgtggcagcatataatttaacttggaaatcaactaatttcaagacaattttggagtgggaacccaaacccgtcaatcaagtctacactgttcaaataagcactaagtcaggagattggaaaagcaaatgcttttacacaacagacacagagtgtgacctcaccgacgagattgtgaaggatgtgaagcagacgtacttggcacgggtcttctcctacccggcagggaatgtggagagcaccggttctgctggggagcctctgtatgagaactccccagagttcacaccttacctggagacaaacctcggacagccaacaattcagagttttgaacaggtgggaacaaaagtgaatgtgaccgtagaagatgaacggactttagtcagaaggaacaacactttcctaagcctccgggatgtttttggcaaggacttaatttatacactttattattggaaatcttcaagttcaggaaagaaaacagccaaaacaaacactaatgagtttttgattgatgtggataaaggagaaaactactgtttcagtgttcaagcagtgattccctcccgaacagttaaccggaagagtacagacagcccggtagagtgtatgggccaggagaaaggggaattcagagaaatattctacatcattggagctgtggtatttgtggtcatcatccttgtcatcatcctggctatatctctacacaagtgtagaaaggcaggagtggggcagagctggaaggagaactccccactgaatgtttcataaaggaagcactgttggagctactgcaaatgctatattgcactgtgaccgagaacttttaagaggatagaatacatggaaacgcaaatgagtatttcggagcatgaagaccctggagttcaaaaaactcttgatatgacctgttattaccattagcattctggttttgacatcagcattagtcactttgaaatgtaacgaatggtactacaaccaattccaagttttaatttttaacaccatggcaccttttgcacataacatgctttagattatatattccgcacttaaggattaaccaggtcgtccaagcaaaaacaaatgggaaaatgtcttaaaaaatcctgggtggacttttgaaaagcttttttttttttttttttttgagacggagtcttgctctgttgcccaggctggagtgcagtagcacgatctcggctcacttgcaccctccgtctctcgggttcaagcaattgtctgcctcagcctcccgagtagctgggattacaggtgcgcactaccacgccaagctaatttttgtattttttagtagagatggggtttcaccatcttggccaggctggtcttgaattcctgacctcagtgatccacccaccttggcctcccaaagatgctagtattatgggcgtgaaccaccatgcccagccgaaaagcttttgaggggctgacttcaatccatgtaggaaagtaaaatggaaggaaattgggtgcatttctaggacttttctaacatatgtctataatatagtgtttaggttcttttttttttcaggaatacatttggaaattcaaaacaattgggcaaactttgtattaatgtgttaagtgcaggagacattggtattctgggcagcttcctaatatgctttacaatctgcactttaactgacttaagtggcattaaacatttgagagctaactatatttttataagactactatacaaactacagagtttatgatttaaggtacttaaagcttctatggttgacattgtatatataattttttaaaaaggtttttctatatggggattttctatttatgtaggtaatattgttctatttgtatatattgagataatttatttaatatactttaaataaaggtgactgggaattgtt

SEQ ID NO: 11 - DNA, 2912 bp, Homo sapiens
aatcgcgcccgctccgacgtgtccaggtccgcggccccgggagcttggcgcggcccggcctggatgcgctgggcggagggtgcaggggagggcacggcgccgcttgcttggcctgcgcacccggacctagaagccgggacgagccggggcagagccaggcgcgcggaagtctgaaggtgccctccagacacggccccgatgactgaactacagcaagatgtggaagacacaaagcctgcgaaagtgctcgggaagagggagagcaaacttggctcagcccactcagaggctgagaatggtgtggaggagaaaaagaaagcctgcaggtcgccaacagcccaatcccctaccccatctgtggaggcggactccccagaccagaagaaaatcattagcctatggtcaaaatccagttttgatggtgcctctttagcaagtgataagaacgactgtaaaacagaaagcaaaaatgaccctaagactgaaagaaaaaagtcttcatcttccagccagtacaaggccaatatgcactttcacaagttgtttcttagtgtcccaacggaggaaccactgaagcaaagctttacctgtgctctacagaaagaaatactataccaaggaaagctctttgtatcagaaaactggatttgttttcattccaaagtctttggaaaagacacaaagatctctattccagctttctcggtaaccctaataaagaaaaccaaaactgctcttctagtgccaaacgccctgatcatagcaacagtcacagacaggtacatatttgtctccttactctccagagattcaacttacaaactactaaaatctgtgtgtggacacttagaaaatacaagtgttggtaacagtcccaatccatcttctgctgaaaacagtttccgagcagaccgcccttcatctctgcctctggatttcaatgatgaattctcagatctggatggagtggttcaacgaagaaggcaagacatggaaggatatagtagttctggttctcaaactcctgaatctgagaactctcgagatttccatgcgacagaatcccaaacagttctgaatgtctccaagggagaagcaaagccaactcgggcagatgcccatgtgaacagagtacctgaaggaaaagccaagagtctccctgtacagggtctgtcagaaactgttggaatcttacataaagtcaagtctcagaaatgtccgatgcttcaccatattcttatattctatgcaattgttgtctgtgcactaatcatctcgaccttctacatgagatacagaattaatactctggaggagcagctggggttactaacctccattgtggacacccataatactgaacaggcagcaccatctggcctgaggtcacaagtacaattcaatgtggaggttctctgtcaagagcttacagctaacatagtgaaattagaaaagatacaaaataacttacagaagttgcttgagaatggtgactgatcgaccagattgcttgggccatcggaatacctcatgtttccctttgaagaaggtgcttcccgaggcgttttgtttgagtgcaccctgctggtcagaggtgcaagcagatgagaatccagacattgcatgtggaggtctccagctcaggaaagtggggagggaaataattttggttcttgtgcaataaaagttgaccttgactctctgaggaagattttgctgcttttgcctgaagaaaacagacccatctctggaggtctcaggaagggcccagcgaacacactctcttggataattaccacgatggcgtcagcaaacactccaccctgtgcctttttagtccttcccgccctcctgcctctcccttacacccctcttaacgactttcaaactaaaggatacatcatatactgacaaactcaatgtggtcctttcaagaattagccatgagtctcaaaaaggcaataaatggctctaagtggacaggtttgcttcaaacaagtaacatctacattttgtcttttttttttcagttctcctgttatgttctggttgaaatcacctgtgtgtcttaatttctcaattcctttttggcaagaatatcaagcaaggtgaatttaacattatgtttatgttttgttttgttgctgtaactaatagttaattggactgattcttacccagccctggtcaagaatctgtgaggcatgtgactgaagtactaaattaaacttattttgaaaccaaacctaatttttaagccaaaaggtgtaatagtgatttaatacaggatgaaaaacactgaatttttaagactgtaggtggactatgttagtagttttcaagcaggatgtctgtattcagcattcaataatgctaaaatccctttcagcatgaaatttgtatgtttttatcctttgctgactaaaataaaataactggtggtttgctaactatttaccatatgggttggctggtttttattaataattgtttagggtatcataagatctgtaagtacaaaggatattctgtttctatctgcaatgcatttgataatcatttctatgaaatgtattttatttaatcagataagctaataagcgaattggttacatcgtttgtatctgttggcctagtggacagctgtgcctggtgcacctctggcttttaataaatactcattggttgaaacaccctgctaacactgtgttttgtcagttcgtaaattcctttaaccaagacttaactatgctttttaactctttttccacctgccatctactactaccaactcacttatacttccttcctcccaagtaatcatttcaaaactaaaaaaggatttaagttcttgggttacaacggtttaaaggaaagaaaatgaactttgaagtcaaaaaaaaaaaaaaaaa

SEQ ID NO: 12 - DNA, 3287 bp, Homo sapiens
atggcgctggctgtcttgcgggtcctggagccctttccgaccgagacacccccgttggcagtgctgctgccacccgggggcccgtggccggcggcggagctgggcctggtgctggccctgaggcctgcaggggagagcccggcagggccggcgctgctggtggcagccctggaggggccggacgcgggcaccgaagagcagggtcccgggccgccgcagctactggttagccgcgcgctgctgcggctcctggcactgggctccggggcctgggtgcgggcgcgggcggtgcggcggcccccggcgctaggttgggcactgcttggcacctcgctggggcctgggctcggaccgcgagtcgggccgctgctggtgaggcgcggagagaccctcccagttcccggaccgcgggtgctggagacgcggccggcgttgcaagggctgctgggcccagggactcggctggctgtgactgagctccgcgggcgggccagactgtgtccagagtctggggacagcagtcggcccccacccccgcccgtggtgtcctcctttgcggtttctggcacagtgcggcgactccagggagttctgggagggactggagattcactaggggtgagccggagctgtctccgtggccttggcctcttccagggcgaatgggtgtgggtggcccaggccagagagtcatcgaacacttcacagccgcacttggctagggtgcaggtcctagaacctcgctgggacctctctgatagactgggacccggctctggaccgctgggagagcccctcgctgacggactggcgcttgtccctgccactttggcttttaatcttggctgtgaccccctggaaatgggagagctcagaattcagaggtacttggaaggctccatcgcccctgaagacaaaggaagctgctcattgctgcctgggcctccatttgccagagagttacacatcgaaattgtgtcttctccccactacagcactaatggaaattatgacggtgttctttaccggcactttcagatacccagggtagtccaggaaggggatgttctatgtgtgccaacaattgggcaagtagagatcctggaaggaagtccagagaaactgcccaggtggcgggaaatgttttttaaagtgaagaaaacagttggggaagctccagatggaccagccagtgcctacttggccgacaccacccatacctccttgtacatggtgggttctaccctgagccctgttccatggctcccttcagaggaatccactctctggagcagtttgtctcctccaggcctggaggccttggtgtctgaactctgtgctgtcctgaagcctcgcctccagccagggggtgccctgctgacaggaactagcagtgtccttctacggggccccccaggctgtgggaagaccacagtagttgctgctgcctgtagtcaccttgggctccacttactgaaggtgccctgctccagcctctgtgcagaaagtagtggggctgtggagacaaaactgcaggccatcttctcccgggcccgccgttgccggcctgcagtcctgttgctcacagctgtggaccttctgggccgggaccgtgatgggctgggtgaggatgcccgtgtgatggctgtgctgcgtcacctcctcctcaatgaggaccccctcaacagctgccctcccctcatggttgtggccaccacaagccgggcccaggacctgcctgctgatgtgcagacagcatttcctcatgagctcgaggtgcctgctctgtcagaggggcagcggctcagcatcctgcgggccctcactgcccaccttcccctgggccaggaggtgaacttggcacagctagcacggcggtgtgcaggctttgtggtaggggatctctatgcccttctgacccacagcagccgggcagcctgcaccaggatcaagaactcaggtttggcaggtggcttgactgaggaggatgagggggagctgtgtgctgccggctttcctctcctggctgaggactttgggcaggcactggagcaactgcagacagctcactcccaggccgttggagcccccaagatcccctcagtgtcctggcatgatgtgggtgggctgcaggaggtgaagaaggagatcctggagaccattcagctccccctggagcaccctgagctactgagcctgggcctgagacgctcaggccttctgctccatgggccccctggcaccggcaagacccttctggccaaggcagtagccactgagtgcagccttaccttcctcagcgtgaaggggccagagctcattaacatgtatgtgggccaaagtgaggagaatgtgcgggaagtgtttgccagggccagggctgcagctccatgcattatcttctttgatgaactggactctttggccccaagccgggggcgaagtggagattctggaggagtgatggacagggtggtgtctcagctccttgccgagctagatgggctgcacagcactcaggatgtgtttgtgattggagccaccaacagaccagatctcctggaccctgcccttctgcggcctggcagatttgacaagctggtgtttgtgggggcaaatgaggaccgggcctcccagctacgcgttctaagtgccatcacacgcaaattcaagctagagccatctgtgagcctggtaaacgtgctagattgctgccctccccagctgacgggcgcggacctctactctctctgctctgatgctatgacagctgccctcaaacgcagggttcatgacctggaggaagggctggaacaaggtagctcagcactgatgctcaccatggaggacttgctgcaggctgccgcccggctgcaaccctcagtcagtgagcaggagctgctccggtacaagcgcatccagcgcaagtttgctgcctgctaggagccccccagggtctgggaccccgctcagcatggctgcaggtaccttgatagcccacagagagatctgggaaggaagggctcctcctcaggctgctgccaacccacctggaggccacctccctccaggagatcccagggtgcaaagtggcattgagacagcagcaacagctcaagagatatctcctgcctacttgcccctccttccaggccggctctaagagaaaggcccatctactcaggaagagggccagggccttgggttctggggattgggccctgagagggctagttctgtggctgaaaataaagcatgtcccgccccctaaaaaaaaaaaaaaaaaa

SEQ ID NO: 13 - DNA, 2952 bp, Homo sapiens
cagtttcattaggctctgaagccattacaaaggttgcttaacttctaattatttgatcactgaggaaaatccagaaagctacacaacactgaaggggtgaaataaaagtccagcgatccagcgaaagaaaagagaagtgacagaaacaactttacctggactgaagataaaagcacagacaagagaacaatgccctggacatggctccagagatccacatgacaggcccaatgtgcctcattgagaacactaatggggaactggtggcgaatccagaagctctgaaaatcctgtctgccattacacagcctgtggtggtggtggcaattgtgggcctctaccgcacaggaaaatcctacctgatgaacaagctagctgggaagaataagggcttctctctgggctccacagtgaaatctcacaccaaaggaatctggatgtggtgtgtgcctcaccccaaaaagccagaacacaccttagtcctgcttgacactgagggcctgggagatgtaaagaagggtgacaaccagaatgactcctggatcttcaccctggccgtcctcctgagcagcactctcgtgtacaatagcatgggaaccatcaaccagcaggctatggaccaactgtactatgtgacagagctgacacatcgaatccgatcaaaatcctcacctgatgagaatgagaatgaggattcagctgactttgtgagcttcttcccagattttgtgtggacactgagagatttctccctggacttggaagcagatggacaacccctcacaccagatgagtacctggagtattccctgaagctaacgcaaggtaacaggaagcttgcccagcttgagaaactacaagatgaagagctggaccctgaatttgtgcaacaagtagcagacttctgttcctacatctttagcaattccaaaactaaaactctttcaggaggcatcaaggtcaatgggccttgtctagagagcctagtgctgacctatatcaatgctatcagcagaggggatctgccctgcatggagaacgcagtcctggccttggcccagatagagaactcagccgcagtgcaaaaggctattgcccactatgaccagcagatgggccagaaggtgcagctgcccgcagaaaccctccaggagctgctggacctgcacagggttagtgagagggaggccactgaagtctatatgaagaactctttcaaggatgtggaccatctgtttcaaaagaaattagcggcccagctagacaaaaagcgggatgacttttgtaaacagaatcaagaagcatcatcagatcgttgctcagctttacttcaggtcattttcagtcctctagaagaagaagtgaaggcgggaatttattcgaaaccagggggctattgtctctttattcagaagctacaagacctggagaaaaagtactatgaggaaccaaggaaggggatacaggctgaagagattctgcagacatacttgaaatccaaggagtctgtgaccgatgcaattctacagacagaccagattctcacagaaaaggaaaaggagattgaagtggaatgtgtaaaagctgaatctgcacaggcttcagcaaaaatggtggaggaaatgcaaataaagtatcagcagatgatggaagagaaagagaagagttatcaagaacatgtgaaacaattgactgagaagatggagagggagagggcccagttgctggaagagcaagagaagaccctcactagtaaacttcaggaacaggcccgagtactaaaggagagatgccaaggtgaaagtacccaacttcaaaatgagatacaaaagctacagaagaccctgaaaaaaaaaaccaagagatatatgtcgcataagctaaagatctaaacaacagagcttttctgtcatcctaacccaaggcataactgaaacaattttagaatttggaacaagtgtcactatatttgataataattagatcttgcatcataacactaaaagtttacaagaacatgcagttcaatgatcaaaatcatgttttttccttaaaaagattgtaaattgtgcaacaaagatgcatttacctctgtaccaacagaggagggatcatgagttgccaccactcagaagtttattcttccagacgaccagtggatactgaggaaagtcttaggtaaaaatcttgggacatatttgggcactggtttggccaagtgtacaataggtcccaatatcagaaacaaccatcctagcttcctagggaagacagtgtacagttctccattatatcaaggctacaaggtctatgagcaataatgtgatttctggacattgcccatggataattctcactgatggatctcaagctaaagcaaaccatcttatacagagatctagaatcttatattttccataggaaggtaaagaaatcattagcaagagtaggaattgaatcataaacaaattggctaatgaagaaatcttttctttcttgttcaattcatctagattataaccttaatgtgacacctgagacctttagacagttgaccctgaattaaatagtcacatggtaacaattatgcactgtgtaattttagtaatgtataacatgcaatgatgcactttaactgaagatagagactatgttagaaaattgaactaatttaattatttgattgttttaatcctaaagcataagttagtcttttcctgattcttaaaggtcatacttgaaatcctgccaattttccccaaagggaatatggaattttttttgactttcttttgagcaataaaataattgtcttgccattacttagtatatgtagacttcatcccaattgtcaaacatcctaggtaagtggttgacatttcttacagcaattacagattatttttgaactagaaataaactaaactagaaacaaaaaaaaaaaaaaaaaaa

SEQ ID NO: 14 - DNA, 1751 bp, Homo sapiens
ttttgcatgcacttttcaaaatgattgacttaagcttcctgactgaagaggaacaagaggccatcatgaaggttttgcagcgggatgctgctctgaagagggccgaagaagagagagtcagacatttgcctgaaaaaattaaggatgaccagcagctgaagaatatgagtggccaatggttttatgaagccaaggcaaaaaggcacagggacaaaatccatggcgcagatatcatcagagcatctatgagaaagaagaggccccagatagcagctgagcagagtaaagacagagaaaatggggcaaaggaaagctgggtgaataatgtcaacaaagatgctttccttcctccagagctggctggcgttgtagaagagccagaagaagatgcagcaccagcaagcccgagttccagtgtggtaaatccagcttccagtgtgattgatatgtcccaggaaaacacaaggaaaccaaatgtgtctccagagaagaggaagaatccgtttaatagctccaagttgccagaaggtcactcatcacaacaaactaaaaatgaacagtcaaaaaatggaagaactggtttatttcagacttcaaaagaggatgaattgtcagagtcaaaagaaaagtcaactgtcgcagatacttcaatccaaaagttagagaaatcaaagcagactttgccaggcctttcaaatgggtcccaaatcaaggctccaatccccaaagccaggaagatgatctacaaatcaactgatttaaacaaagatgataaccagtcttttcctagacaaaggacagactccctgaaagcgagaggggctccgagagggatcctcaagcgcaactccagttccagtagcacagactcagaaacccttcgttataatcacaactttgaacccaaaagcaaaattgtgtcacctggcctaaccatccatgagagaatttctgagaaggagcattctttagaagacaactcttccccaaactccctggagccattaaagcatgtgagattctctgcagtgaaggatgagcttccacagagtcctgggctaatccatggtcgggaagtaggagaatttagtgttttagaatctgacagattgaaaaatggaatggaagatgcaggggacacagaagagtttcagagtgaccctaagccttctcaatacagaaagccttcgctttttcatcaatcaacctcaagcccatatgtatcaaaaagtgaaacacatcagccaatgacttctggttcttttccaattaatgggctgcattctcattcagaagttttaactgcaagaccacagtctatggagaattcaccaaccatcaatgaacccaaagataaatcatcagaattaacaaggcttgaatctgtattacccagaagccctgctggtaagagagttgtcactactagattataaaaacttggtggggccgggcgcggtggctcacgcctgtaatcccagcactttgggaggccgaggcgggtggatcatgaggtcaggagatcgagaccatcctggctaacaaggtgaaaccccgtctctactaaaaatacaaaaaattagccgggcgcggtggcgggcgcctgtagtcccagctactcgggaggctgaggcaggagaatggcgtgaacccgggaagcggagcttgcagtgagctgagattgcgccactgcagtccgcagtccggcctgggcgacagagcgagactccgtctcaaaaaaaaaaaaaaaa

SEQ ID NO: 15 - DNA, 2000 bp, Homo sapiens
attttcctggggctccggggcgcggagaagctgcatcccagaggagcgcgtccaggagcggacccgggagtgtttcaagagccagtgacaaggaccaggggcccaagtcccaccagccatgcagacctgccccctggcattccctggccacgtttcccaggcccttgggaccctcctgtttttggctgcctccttgagtgctcagaatgaaggctgggacagccccatctgcacagagggggtagtctctgtgtcttggggcgagaacaccgtcatgtcctgcaacatctccaacgccttctcccatgtcaacatcaagctgcgtgcccacgggcaggagagcgccatcttcaatgaggtggctccaggctacttctcccgggacggctggcagctccaggttcagggaggcgtggcacagctggtgatcaaaggcgcccgggactcccatgctgggctgtacatgtggcacctcgtgggacaccagagaaataacagacaagtcacgctggaggtttcaggtgcagaaccccagtccgcccctgacactgggttctggcctgtgccagcggtggtcactgctgtcttcatcctcttggtcgctctggtcatgttcgcctggtacaggtgccgctgttcccagcaacgccgggagaagaagttcttcctcctagaaccccagatgaaggtcgcagccctcagagcgggagcccagcagggcctgagcagagcctccgctgaactgtggaccccagactccgagcccaccccaaggccgctggcactggtgttcaaaccctcaccacttggagccctggagctgctgtccccccaacccttgtttccatatgccgcagacccatagccgcctgcaaggcagagaggacacaggagagccagccctgagtgccgaccttgggtggcggggcctgggtctctcgtcccacccggagggcacagacaccggcttgcttggcaggctgggcctctgtgtcacccactcctgggtgcgtgcagacccttcccctccaccccccaggtcttccaagctctgcttcctcagtttccaaaatggaaccacctcacctccgcagcacccgacttaccaggacgcatgcccctccctctgccctcatcaaacccacagacccggactccctttctgccaccccaggctggtccggccccaggtgtggggtccgctctctccactcccagggctccgcgcccaagtgagggggcccctgccggagcctcagacacactggagttcagggctgggggggccttggcacatacctgtcccttggctatgagcaggctttgggggcccttccgcggcagccccgggggccgaggtagggtctgggggcttagaggctgggatggctcctggccccaccgccagggggcaagcgcaggccgggctgggaggcggcggcggcggctcgggctggggggtcaggtggacgctgcctccggggctggtcgcgcatccctcagtccctcggccacccgggggtcgctccctcgtgcccaccgcacctgccgagcctctttggacccagatctgttcatgcttttgtcttcgtcactgcggcggggccctttgatgtcttcatctgtatggggtggaaaaatcaccgggaatcccccttcagttctttgaaaaagttccatgactcgaatatctgaaatgaagaaaacaaaccgactcacaaacctccaagtagctccaaatgcaatttttaaaatggaaaacaaaaatctgaaagaaacgtctttagtggctttaagccccaaaacgtccctaaggcgtcctcgagatgaagacgggggggagcccccagccaggtggagaccccgcaggacgcggcggcgcccggtgaccgaggcctcgcacagccggccgccctgagggtcgggccggagccagggtccaagaggggcgcgtttgtgtctcgggttaaaataaggttccgtccgcgtgctgggtcaga

SEQ ID NO: 16 - DNA, 3431 bp, Homo sapiens
cagagagcccccgtggagtggtgaggggtgatgtgataaagtcaacggggggcattcgttccctcccctgggagcagaggcccttctagtgtgtcaggctctgggcggagggcagcagcccctgggcaggcatcggagcttccagcctggggagaccttggagatcatcttggccagagtgaagacccacccagggagggccaggaccacctgtgggctgtgcacatgtgaccctgacgaggatgtgccccaaactacatgtgatgttcttcatttccaaatcaatctggccacgtcggagtcatccttgccgcagcatcgcttgcacatgtgatgttcttcatttccaaatcaacctggccacgtcggagtcttccttgctgcagcatcgcttgcacatgtgatgttcttcatttccaaatcaacctggccacgtcggagtcatccttgctgcagcatcgcttgcacatgtgatgttcttcatttccaaatcaacctggccacgtcagagtcatccttgctgcagcatcgcttgcacatgtgatgttcttcatttccaaatcaatctggccacgtcggagtcatccttgctgcagcatcgcttgcacatgtgatgttcttcatttccaaatcaacctggccatgtcggagtcatccttgctgcagcatcgcttgcactcacctccagcccatacatcaatgggagagaaagggcctgagtttcagccagtaaataccctggaattgtgaggtatagctctaagaatgtgttacgtgactgaacggcttctgtaatgtccatcccagcagaattgagagccactgctatagctgatccttctctgaggctcaggtccttgcttgaaccttcccagcgcttgtctggcttctccttgtatgccccagcagcagggagctcattccctccactggatgggcaacttgcaaaaggaaaactcagagatgtttatcacagcattattcataatcaaaaaccaactgcaaacaccccaggttcaaattaaaaaacgacaggaaaaggattatgagtaagttctggtaaattcacccaatagaatcatcaccagaggttaaaaatgatcactgggaagcttatgtagcaacattgaaaggttttacaaagtgacactgagttaattttacagtatgattgtaaatatatgataaaatatgttgattttaaaaacaaacactacttgagcacttgctatgttttggtccctgtacttagtgttgtcacacattatctcacttagtctcccaactgcccagtaggttagttggtatttgccccttttacagatgaggaaacagagggtcagagtggttcagtggcctgcctgaggccttccagccagaacatcagccaggacttaaattcagacctactggtccctttaccacatcatgctgacatcaagaatagagaagggtgctatgagtattttatttttctttcagacttcctcttctgttgccattattggaaatttctaaggaaaagaagctttgggggctcatttgagggtgtgactccccaggaccagggagatgtttatgtccaactgataacatattttactctcttctccaggatgacatggaagcttaccggacccagaactgcttcctcaactccgagatccaccaggtcacaaagatctggagaaaggtggctgagaaggagaaggcccttctgacgaagtgcgcctacctccaagccagaaactgccaggtggaaagcaagtacctggccggtctgagaaggctgcaggaggccctgggggacgaagccagcgagtgctcagagctgctgaggcagcttgtccaggaggcactgcagtgggaagctggggaggcctcatctgacagcatcgagctgagccccatcagtaagtatgatgagtacggcttcctgacggtgcccgactatgaggtggaagacctgaagctgctggccaagatccaggcgttggagtcacgatcccaccacctgctgggcctcgaggctgtggatcggccgctgagggagcgctgggctgccctgggcgatcttgtgccctcagccgagctcaagcagctactgcgggcaggagtaccccgtgaacaccggcctcgtgtctggaggtggctggtccacctccgtgtccagcacctgcacactccaggctgctaccaggaactgctgagccggggccaggcccgcgagcaccctgctgcccgccagattgagctggacctgaaccggaccttccccaacaacaaacacttcacctgccccacctccagcttccccgacaagctccgccgggtgctgctggccttctcctggcagaaccccaccatcggctactgccagggcctgaacaggctggcggccattgccctgctggtcctagaggaggaggagagcgccttctggtgcctggtggccattgtggagaccatcatgcccgctgattactactgcaacacgctgacggcatcccaggtggaccagcgggtgctccaggacctgctctcggagaagctgcccaggctgatggcccatctggggcagcaccacgtggatctctccctcgtcaccttcaactggttcctcgtggtctttgcggacagtctcattagcaacatcctccttcgggtctgggatgccttcctgtacgaggggacgaaggtggtgtttcgctatgccttggccattttcaagtacaacgagaaggagatcttgaggctacagaatggcctggaaatctaccagtacctgcgcttcttcaccaagaccatctccaacagccggaagctgatgaacatcgccttcaatgacatgaaccccttccgcatgaaacagctgcggcagctgcgcatggtccaccgggagcggctggaggctgagctgcgggagctggagcagcttaaggcagagtacctggagaggcgggcatcccggcgcagagctgtgtccgagggctgtgccagcgaggacgaggtggagggggaagcctgacttggccacctcccctccccacagccttcctcacccttggctggcagacccactggaggtcaggcacggaccagtggcccagccctgggtgtcccatcaccatgtgaccttggacatgtcccttcccctctctggccctcagtttccccactgggacattgtgtgctgcaaagccattggttgggctacttcttcataggcacttacttacccagggatgccaccctttcgtcacctcttccacagagcactttggcatgtaaacaagcaagagcactgcctctatagggtaacctggaacattctctaggttatatcaatataaaacaatgtaaatggtggaaatcaaaaaaaaaaaaaaaaaaaaaaaaaaaaaaaaaaaaaaaaaaaaaaaaaaaaaaaa

SEQ ID NO: 17 - DNA, 936 bp, Homo sapiens
gagggcgcgatcctggcgtcccccgacggcctggggccccaatccagaggcctgggtgggaggggaccaagggtgtagtaaggaagcgccttttgctggagggcaacggaccggggcggggagtcgggagaccagagtgggaggaaggcggggagtccaggttccgccccggagccgacttcctcctggtcggcggctgcagcggggtgagcggcggcagcggccggggatcctggagccatggggcgcgcgcgcgacgccatcctggatgcgctggagaacctgaccgccgaggagctcaagaagttcaagctgaagctgctgtcggtgccgctgcgcgagggctacgggcgcatcccgcggggcgcgctgctgtccatggacgccttggacctcaccgacaagctggtcagcttctacctggagacctacggcgccgagctcaccgctaacgtgctgcgcgacatgggcctgcaggagatggccgggcagctgcaggcggccacgcaccagggctctggagccgcgccagctgggatccaggcccctcctcagtcggcagccaagccaggcctgcactttatagaccagcaccgggctgcgcttatcgcgagggtcacaaacgttgagtggctgctggatgctctgtacgggaaggtcctgacggatgagcagtaccaggcagtgcgggccgagcccaccaacccaagcaagatgcggaagctcttcagtttcacaccagcctggaactggacctgcaaggacttgctcctccaggccctaagggagtcccagtcctacctggtggaggacctggagcggagctgaggctccttcccagcaacactccggtcagcccctggcaatcccaccaaatcatcctgaatctgatctttttatacacaatatacgaaaagccagcttgaaaaaaaaaaa

SEQ ID NO: 18 - DNA, 2786 bp, Homo sapiens
agcactctccagcctctcaccgcaaaattacacaccccagtacaccagcagaggaaacttataacctcgggaggcgggtccttcccctcagtgcggtcacatacttccagaagagcggaccagggctgctgccagcacctgccactcagagcgcctctgtcgctgggacccttcagaactctctttgctcacaagttaccaaaaaaaaaagagccaacatgttggtattgctggctggtatctttgtggtccacatcgctactgttattatgctatttgttagcaccattgccaatgtctggttggtttccaatacggtagatgcatcagtaggtctttggaaaaactgtaccaacattagctgcagtgacagcctgtcatatgccagtgaagatgccctcaagacagtgcaggccttcatgattctctctatcatcttctgtgtcattgccctcctggtcttcgtgttccagctcttcaccatggagaagggaaaccggttcttcctctcaggggccaccacactggtgtgctggctgtgcattcttgtgggggtgtccatctacactagtcattatgcgaatcgtgatggaacgcagtatcaccacggctattcctacatcctgggctggatctgcttctgcttcagcttcatcatcggcgttctctatctggtcctgagaaagaaataaggccggacgagttcatggggatctggggggtggggaggaggaagccgttgaatctgggagggaagtggaggttgctgtacaggaaaaaccgagataggggaggggggagggggaagcaaaggggggaggtcaaatcccaaaccattactgaggggattctctactgccaagcccctgccctggggagaaagtagttggctagtactttgatgctcccttgatggggtccagagagcctccctgcagccaccagacttggcctccagctgttcttagtgacacacactgtctggggccccatcagctgccacaacaccagccccacttctgggtcatgcactgaggtccacagacctactgcactgagttaaaatagcggtacaagttctggcaagagcagatactgtctttgtgctgaatacgctaagcctggaagccatcctgcccttctgacccaaagcaaaacatcacattccagtctgaagtgcctactggggggctttggcctgtgagccattgtccctctttggaacagatatttagctctgtggaattcagtgacaaaatgggaggaggaaagagagtttgtaaggtcatgctggtgggttagctaaaccaagaaggagaccttttcacaatggaaaacctgggggatggtcagagcccagtcgagacctcacacacggctgtccctcatggagacctcatgccatggtctttgctaggcctcttgctgaaagccaaggcagctcttctggagtttctctaaagtcactagtgaacaattcggtggtaaaagtaccacacaaactatgggatccaaggggcagtcttgcaacagtgccatgttagggttatgtttttaggattcccctcaatgcagtcagtgtttcttttaagtatacaacaggagagagatggacatggctcattgtagcacaatcctattactcttcctctaacatttttgaggaagttttgtctaattatcaatattgaggatcagggctcctaggctcagtggtagctctggcttagacaccacctggagtgatcacctcttggggaccctgcctatcccacttcacaggtgaggcatggcaattctggaagctgattaaaacacacataaaccaaaaccaaacaacaggcccttgggtgaaaggtgctatataattgtgaagtattaagcctaccgtatttcagccatgataagaacagagtgcctgcattcccaggaaaatacgaaaatcccatgagataaataaaaatataggtgatgggcagatcttttctttaaaataaaaaagcaaaaactcttgtggtacctagtcagatggtagacgagctgtctgctgccgcaggagcacctctatacaggacttagaagtagtatgttattcctggttaagcaggcattgctttgccctggagcagctattttaagccatctcagattctgtctaaaggggttttttgggaagacgttttctttatcgccctgagaagatctaccccagggagaatctgagacatcttgcctacttttctttattagctttctcctcatccatttcttttatacctttcctttttggggagttgttatgccatgatttttggtatttatgtaaaaggattattactaattctatttctctatgtttattctagttaaggaaatgttgagggcaagccaccaaattacctaggctgaggttagagagattggccagcaaaaactgtgggaagatgaactttgtcattatgatttcattatcacatgattatagaaggctgtcttagtgcaaaaaacatacttacatttcagacatatccaaagggaatactcacattttgttaagaagttgaactatgactggagtaaaccatgtattcccttatcttttactttttttctgtgacatttatgtctcatgtaatttgcattactctggtggattgttctagtactgtattgggcttcttcgttaatagattatttcatatactataattgtaaatattttgatacaaatgtttataactctagggatataaaaacagattctgattcccttcaaaaaaaaaaaa

SEQ ID NO: 19 - DNA, 4637 bp, Homo sapiens
aggtgaacaggtcctcacgcccagctccgccccctcacgcgctctcgccgggaccccgcttccgctggcagccatgggccccggccccagccgcgcgccccgcgccccacgcctgatgctctgtgcgctcgccttgatggtggcggccggcggctgcgtcgtctccgccttcaacctggatacccgattcctggtagtgaaggaggccgggaacccgggcagcctcttcggctactcggtcgccctccatcggcagacagagcggcagcagcgctacctgctcctggctggtgccccccgggagctcgctgtgcccgatggctacaccaaccggactggtgctgtgtacctgtgcccactcactgcccacaaggatgactgtgagcggatgaacatcacagtgaaaaatgaccctggccatcacattattgaggacatgtggcttggagtgactgtggccagccagggccctgcaggcagagttctggtctgtgcccaccgctacacccaggtgctgtggtcagggtcagaagaccagcggcgcatggtgggcaagtgctacgtgcgaggcaatgacctagagctggactccagtgatgactggcagacctaccacaacgagatgtgcaatagcaacacagactacctggagacgggcatgtgccagctgggcaccagcggtggcttcacccagaacactgtgtacttcggcgcccccggtgcctacaactggaaaggaaacagctacatgattcagcgcaaggagtgggacttatctgagtatagttacaaggacccagaggaccaaggaaacctctatattgggtacacgatgcaggtaggcagcttcatcctgcaccccaaaaacatcaccattgtgacaggtgccccacggcaccgacatatgggcgcggtgttcttgctgagccaggaggcaggcggagacctgcggaggaggcaggtgctggagggctcgcaggtgggcgcctattttggcagcgcaattgccctggcagacctgaacaatgatgggtggcaggacctcctggtgggcgccccctactacttcgagaggaaagaggaagtagggggtgccatctatgtcttcatgaaccaggcgggaacctccttccctgctcacccctcactccttcttcatggccccagtggctctgcctttggtttatctgtggccagcattggtgacatcaaccaggatggatttcaggatattgctgtgggagctccgtttgaaggcttgggcaaagtgtacatctatcacagtagctctaaggggctccttagacagccccagcaggtaatccatggagagaagctgggactgcctgggttggccaccttcggctattccctcagtgggcagatggatgtggatgagaacttctacccagaccttctagtgggaagcctgtcagaccacattgtgctgctgcgggcccggccagtcatcaacatcgtccacaagaccttggtgcccaggccagctgtgctggaccctgcactttgcacggccacctcttgtgtgcaagtggagctgtgctttgcttacaaccagagtgccgggaaccccaactacaggcgaaacatcaccctggcctacactctggaggctgacagggaccgccggccgccccggctccgctttgccggcagtgagtccgctgtcttccacggcttcttctccatgcccgagatgcgctgccagaagctggagctgctcctgatggacaacctccgtgacaaactccgccccatcatcatctccatgaactactctttacctttgcggatgcccgatcgcccccggctggggctgcggtccctggacgcctacccgatcctcaaccaggcacaggctctggagaaccacactgaggtccagttccagaaggagtgcgggcctgacaacaagtgtgagagcaacttgcagatgcgggcagccttcgtgtcagagcagcagcagaagctgagcaggctccagtacagcagagacgtccggaaattgctcctgagcatcaacgtgacgaacacccggacctcggagcgctccggggaggacgcccacgaggcgctgctcaccctggtggtgcctcccgccctgctgctgtcctcagtgcgcccccccggggcctgccaagctaatgagaccatcttttgcgagctggggaaccccttcaaacggaaccagaggatggagctgctcatcgcctttgaggtcatcggggtgaccctgcacacaagggaccttcaggtgcagctgcagctctccacgtcgagtcaccaggacaacctgtggcccatgatcctcactctgctggtggactatacactccagacctcgcttagcatggtaaatcaccggctacaaagcttctttggggggacagtgatgggtgagtctggcatgaaaactgtggaggatgtaggaagccccctcaagtatgaattccaggtgggcccaatgggggaggggctggtgggcctggggaccctggtcctaggtctggagtggccctacgaagtcagcaatggcaagtggctgctgtatcccacggagatcaccgtccatggcaatgggtcctggccctgccgaccacctggagaccttatcaaccctctcaacctcactctttctgaccctggggacaggccatcatccccacagcgcaggcgccgacagctggatccagggggaggccagggccccccacctgtcactctggctgctgccaaaaaagccaagtctgagactgtgctgacctgtgccacagggcgtgcccactgtgtgtggctagagtgccccatccctgatgcccccgttgtcaccaacgtgactgtgaaggcacgagtgtggaacagcaccttcatcgaggattacagagactttgaccgagtccgggtaaatggctgggctaccctattcctccgaaccagcatccccaccatcaacatggagaacaagaccacgtggttctctgtggacattgactcggagctggtggaggagctgccggccgaaatcgagctgtggctggtgctggtggccgtgggtgcagggctgctgctgctggggctgatcatcctcctgctgtggaagtgcggcttcttcaagcgagcccgcactcgcgccctgtatgaagctaagaggcagaaggcggagatgaagagccagccgtcagagacagagaggctgaccgacgactactgagggggcagccccccgcccccggcccacctggtgtgacttctttaagcggacccgctattatcagatcatgcccaagtaccacgcagtgcggatccgggaggaggagcgctacccacctccagggagcaccctgcccaccaagaagcactgggtgaccagctggcagactcgggaccaatactactgacgtcctccctgatcccaccccctcctcccccagtgtcccctttcttcctatttatcataagttatgcctctgacagtccacaggggccaccacctttggctggtagcagcaggctcaggcacatacacctcgtcaagagcatgcacatgctgtctggccctggggatcttcccacaggagggccagcgctgtggaccttacaacgccgagtgcactgcattcctgtgccctagatgcacgtggggcccactgctcgtggactgtgctggtgcatcacggatggtgcatgggctcgccgtgtctcagcctctgccagcgccagcgccaaaacaagccaaagagcctcccaccagagccgggaggaaaaggcccctgcaatgtggtgacacctcccctttcacacctggatccatcttgagagccacagtcactggattgactttgctgtcaaaactactgacagggagcagcccccgggccgctggctggtgggcccccaattgacacccatgccagagaggtggggatcctgcctaaggttgtctacgggggcacttggaggacctggcgtgctcagacccaacagcaaaggaactagaaagaaggacccagaaggcttgctttcctgcatctctgtgaagcctctctccttggccacagactgaactcgcagggagtgcagcaggaaggaacaaagacaggcaaacggcaacgtagcctgggctcactgtgctggggcatggcgggatcctccacagagaggaggggaccaattctggacagacagatgttgggaggatacagaggagatgccacttctcactcaccactaccagccagcctccagaaggccccagagagaccctgcaagaccacggagggagccgacacttgaatgtagtaataggcagggggccctgccaccccatccagccagaccccagctgaaccatgcgtcaggggcctagaggtggagttcttagctatccttggctttctgtgccagcctggctctgcccctcccccatgggctgtgtcctaaggcccatttgagaagctgaggctagttccaaaaacctctcctgacccctgcctgttggcagcccactccccagccccagccccttccatggtactgtagcaggggaattccctccccctccttgtgccttctttgtatataggcttctcaccgcgaccaataaacagctcccagtttgt

SEQ ID NO: 20 - DNA, 595 bp, Homo sapiens
  misc_feature (14)..(14): n is a, c, g, or t
  misc_feature (55)..(55): n is a, c, g, or t
  misc_feature (67)..(67): n is a, c, g, or t
  misc_feature (91)..(91): n is a, c, g, or t
  misc_feature (487)..(487): n is a, c, g, or t
  misc_feature (536)..(536): n is a, c, g, or t
  misc_feature (553)..(553): n is a, c, g, or t
  misc_feature (576)..(576): n is a, c, g, or t
ctttttggggtctnccctcccagatccaatcccaccagaatctaggctgggaagntctcagatgcanccaccagaatctaggctgggaagntctcagatgcagcctccacttccatcaagaggagaagggatgtcatctgtggttccacacagccgccccctgtctagtatcactgcaggctgcgggtggcactggacctctctggtctagtactcttgggccacccccaagcccactgttcacacctgtccccaacccataatttccccactccctcgacacttgaccctttgttcccaaccccactaggcctcaaaacactcctgggctctgggggtttgtcccaaagtcctctcattgggtgttagggcaagaagccacaattccaaactccccaccatgacagcaaacagaagcctcattataaagtaggcttcagaaggctcattataaagtagcttcagaaggctcattataaagtggctncagtatttgggtagatatggcgagtttcagggagcactgttgggtcatnctgacaggtcaggtgantgaaccgggcttgatggggattngagttttacagggcccttg

SEQ ID NO: 21 - DNA, 2647 bp, Homo sapiens
gggccggagttcctgcagagggagcgtcaaggccctgtgctgctgtccctgggggccagaggggttgcccagcatgcccactggcaggagagagggaactgacccacttgctcctaccagcttctgaaggctccaaagtccggagtgcagaaagccaggaccaagagacaggcagctcaccagggtggacaaatcgccagagatgtggtgcattgtcctgttttcacttttggcatgggtttatgctgagcctaccatgtatggggagatcctgtcccctaactatcctcaggcatatcccagtgaggtagagaaatcttgggacatagaagttcctgaagggtatgggattcacctctacttcacccatctggacattgagctgtcagagaactgtgcgtatgactcagtgcagataatctcaggagacactgaagaagggaggctctgtggacagaggagcagtaacaatccccactctccaattgtggaagagttccaagtcccatacaacaaactccaggtgatctttaagtcagacttttccaatgaagagcgttttacggggtttgctgcatactatgttgccacagacataaatgaatgcacagattttgtagatgtcccttgtagccacttctgcaacaatttcattggtggttacttctgctcctgccccccggaatatttcctccatgatgacatgaagaattgcggagttaattgcagtggggatgtattcactgcactgattggggagattgcaagtcccaattatcccaaaccatatccagagaactcaaggtgtgaataccagatccggttggagaaagggttccaagtggtggtgaccttgcggagagaagattttgatgtggaagcagctgactcagcgggaaactgccttgacagtttagtttttgttgcaggagatcggcaatttggtccttactgtggtcatggattccctgggcctctaaatattgaaaccaagagtaatgctcttgatatcatcttccaaactgatctaacagggcaaaaaaagggctggaaacttcgctatcatggagatccaatgccctgccctaaggaagacactcccaattctgtttgggagcctgcgaaggcaaaatatgtctttagagatgtggtgcagataacctgtctggatgggtttgaagttgtggagggacgtgttggtgcaacatctttctattcgacttgtcaaagcaatggaaagtggagtaattccaaactgaaatgtcaacctgtggactgtggcattcctgaatccattgagaatggtaaagttgaagacccagagagcactttgtttggttctgtcatccgctacacttgtgaggagccatattactacatggaaaatggaggaggtggggagtatcactgtgctggtaacgggagctgggtgaatgaggtgctgggcccggagctgccgaaatgtgttccagtctgtggagtccccagagaaccctttgaagaaaaacagaggataattggaggatccgatgcagatattaaaaacttcccctggcaagtcttctttgacaacccatgggctggtggagcgctcattaatgagtactgggtgctgacggctgctcatgttgtggagggaaacagggagccaacaatgtatgttgggtccacctcagtgcagacctcacggctggcaaaatccaagatgctcactcctgagcatgtgtttattcatccgggatggaagctgctggaagtcccagaaggacgaaccaattttgataatgacattgcactggtgcggctgaaagacccagtgaaaatgggacccaccgtctctcccatctgcctaccaggcacctcttccgactacaacctcatggatggggacctgggactgatctcaggctggggccgaacagagaagagagatcgtgctgttcgcctcaaggcggcaaggttacctgtagctcctttaagaaaatgcaaagaagtgaaagtggagaaacccacagcagatgcagaggcctatgttttcactcctaacatgatctgtgctggaggagagaagggcatggatagctgtaaaggggacagtggtggggcctttgctgtacaggatcccaatgacaagaccaaattctacgcagctggcctggtgtcctgggggccccagtgtgggacctatgggctctacacacgggtaaagaactatgttgactggataatgaagactatgcaggaaaatagcaccccccgtgaggactaatccagatacatcccaccagcctctccaagggtggtgaccaatgcattaccttctgttccttatgatattctcattatttcatcatgactgaaagaagacacgagcgaatgatttaaatagaacttgattgttgagacgccttgctagaggtagagtttgatcatagaattgtgctggtcatacatttgtggtctgactccttggggtcctttccccggagtacctattgtagataacactatgggtggggcactcctttcttgcactattccacagggataccttaattctttgtttcctctttacctgttcaaaattccatttacttgatcattctcagtatccactgtctatgtacaataaaggatgtttataagc

SEQ ID NO: 22 - DNA, 1524 bp, Homo sapiens
gccgtcttcccctcctcccgtcctccctcgccccgcatgtactccccgtactgcctcacccaggatgagttccacccgttcatcgaggcactgctgcctcacgtccgcgctttctcctacacctggttcaacctgcaggcgcggaagcgcaagtacttcaagaagcatgaaaagcggatgtcgaaggacgaggagcgggcggtgaaggacgagctgctgggcgagaagcccgagatcaagcagaagtgggcatcccggctgctggccaagctgcgcaaggacatccggcccgagttccgcgaggactacgtgctgaccatcacgggcaagaagcccccctgctgcgtgctctccaaccccgaccagaagggcaagatccggcggattgactgcctgcgccaggctgacaaggtgtggcggctggacctggtcatggtgattttgtttaaggggatccccctggaaagtactgatggggagcggctctacaagtcgcctcagtgctcgaaccccggcctgtgcgtccagccacatcacattggagtcacaatcaaagaactggatctttatctggcttactttgtccacactccggaatccggacaatcagatagttcaaaccagcaaggagatgcggacatcaaaccactgcccaacggacacttaagtttccaggactgttttgtgacttccggggtctggaatgtgacggagctggtgagagtatcacagactcctgttgcaacagcatcagggcccaacttctccctggcggacctggagagtcccagctactacaacatcaaccaggtgaccctggggcggcggtccatcacctcccctccttccaccagcaccaccaagcgccccaagtccatcgatgacagtgagatggagagccctgttgatgacgtgttctatcccgggacaggccgttccccagcagctggcagcagccagtccagcgggtggcccaacgatgtggatgcaggcccggcttctctaaagaagtcaggaaagctggacttctgcagtgccctctcctctcagggcagctccccgcgcatggctttcacccaccacccgctgcctgtgcttgctggagtcagaccagggagcccccgggccacagcatcagccctgcacttcccctccacgtccatcatccagcagtcgagcccgtatttcacgcacccgaccatccgctaccaccaccaccacgggcaggactcactgaaggagtttgtgcagtttgtgtgctcggatggctcgggccaggccaccggacagcattcgcaacgacaggcgcctcctctgccaaccggtttgtcagcatcggaccccgggacggcaactttctgaacatcccacagcagtctcagtcctggttcctctgataaagatcgacaaaagaaacaacaaaatgagaagaagaggttcctcgaaaggggggagaagaaattttgagaacggaaaaatcccccagcccagcccagcccagccccaccggaaagcaaaaatttc

SEQ ID NO: 23 - DNA, 1637 bp, Homo sapiens
ggcaggcatgggagccgcgcgctctctcccggcgcccacacctgtctgagcggcgcagcgagccgcggcccgggcgggctgctcggcgcggaacagtgctcggcatggcagggattccagggctcctcttccttctcttctttctgctctgtgctgttgggcaagtgagcccttacagtgccccctggaaacccacttggcctgcataccgcctccctgtcgtcttgccccagtctaccctcaatttagccaagccagactttggagccgaagccaaattagaagtatcttcttcatgtggaccccagtgtcataagggaactccactgcccacttacgaagaggccaagcaatatctgtcttatgaaacgctctatgccaatggcagccgcacagagacgcaggtgggcatctacatcctcagcagtagtggagatggggcccaacaccgagactcagggtcttcaggaaagtctcgaaggaagcggcagatttatggctatgacagcaggttcagcatttttgggaaggacttcctgctcaactaccctttctcaacatcagtgaagttatccacgggctgcaccggcaccctggtggcagagaagcatgtcctcacagctgcccactgcatacacgatggaaaaacctatgtgaaaggaacccagaagcttcgagtgggcttcctaaagcccaagtttaaagatggtggtcgaggggccaacgactccacttcagccatgcccgagcagatgaaatttcagtggatccgggtgaaacgcacccatgtgcccaagggttggatcaagggcaatgccaatgacatcggcatggattatgattatgccctcctggaactcaaaaagccccacaagagaaaatttatgaagattggggtgagccctcctgctaagcagctgccagggggcagaattcacttctctggttatgacaatgaccgaccaggcaatttggtgtatcgcttctgtgacgtcaaagacgagacctatgacttgctctaccagcaatgcgatgcccagccaggggccagcgggtctggggtctatgtgaggatgtggaagagacagcagcagaagtgggagcgaaaaattattggcattttttcagggcaccagtgggtggacatgaatggttccccacaggatttcaacgtggctgtcagaatcactcctctcaaatatgcccagatttgctattggattaaaggaaactacctggattgtagggaggggtgacacagtgttccctcctggcagcaattaagggtcttcatgttcttattttaggagaggccaaattgttttttgtcattggcgtgcacacgtgtgtgtgtgtgtgtgtgtgtgtgtaaggtgtcttataatcttttacctatttcttacaattgcaagatgactggctttactatttgaaaactggtttgtgtatcatatcatatatcatttaagcagtttgaaggcatacttttgcatagaaataaaaaaaatactgatttggggcaatgaggaatatttgacaattaagttaatcttcacgtttttgcaaactttgatttttatttcatctgaacttgtttcaaagatttatattaaatatttggcatacaagagatatga

SEQ ID NO: 24 - DNA, 2046 bp, Homo sapiens
ggcacgaggcgcccccgagcagcgcccgcgccctccgcgccttctccgccgggacctcgagcgaaagacgcccgcccgccgcccagccctcgcctccctgcccaccgggcccaccgcgccgccaccccgaccccgctgcgcacggcctgtccgctgcacaccagcttgttggcgtcttcgtcgccgcgctcgccccgggctactcctgcgcgccacaatgagctcccgcatcgccagggcgctcgccttagtcgtcacccttctccacttgaccaggctggcgctctccacctgccccgctgcctgccactgccccctggaggcgcccaagtgcgcgccgggagtcgggctggtccgggacggctgcggctgctgtaaggtctgcgccaagcagctcaacgaggactgcagcaaaacgcagccctgcgaccacaccaaggggctggaatgcaacttcggcgccagctccaccgctctgaaggggatctgcagagctcagtcagagggcagaccctgtgaatataactccagaatctaccaaaacggggaaagtttccagcccaactgtaaacatcagtgcacatgtattgatggcgccgtgggctgcattcctctgtgtccccaagaactatctctccccaacttgggctgtcccaaccctcggctggtcaaagttaccgggcagtgctgcgaggagtgggtctgtgacgaggatagtatcaaggaccccatggaggaccaggacggcctccttggcaaggagctgggattcgatgcctccgaggtggagttgacgagaaacaatgaattgattgcagttggaaaaggcagctcactgaagcggctccctgtttttggaatggagcctcgcatcctatacaaccctttacaaggccagaaatgtattgttcaaacaacttcatggtcccagtgctcaaagacctgtggaactggtatctccacacgagttaccaatgacaaccctgagtgccgccttgtgaaagaaacccggatttgtgaggtgcggccttgtggacagccagtgtacagcagcctgaaaaagggcaagaaatgcagcaagaccaagaaatcccccgaaccagtcaggtttacttacgctggatgtttgagtgtgaagaaataccggcccaagtactgcggttcctgcgtggacggccgatgctgcacgccccagctgaccaggactgtgaagatgcggttccgctgcgaagatggggagacattttccaagaacgtcatgatgatccagtcctgcaaatgcaactacaactgcccgcatgccaatgaagcagcgtttcccttctacaggctgttcaatgacattcacaaatttagggactaaatgctacctgggtttccagggcacacctagacaaacaagggagaagagtgtcagaatcagaatcatggagaaaatgggcgggggtggtgtgggtgatgggactcattgtagaaaggaagccttgctcattcttgaggagcattaaggtatttcgaaactgccaagggtgctggtgcggatggacactaatgcagccacgattggagaatactttgcttcatagtattggagcacatgttactgcttcattttggagcttgtggagttgatgactttctgttttctgtttgtaaattatttgctaagcatattttctctaggcttttttccttttggggttctacagtcgtaaaagagataataagattagttggacagtttaaagcttttattcgtcctttgacaaaagtaaatgggagggcattccatcccttcctgaagggggacactccatgagtgtctgtgagaggcagctatctgcactctaaactgcaaacagaaatcaggtgttttaagactgaatgttttatttatcaaaatgtagcctttggggagggaggggaaatgtaatactggaataatttgtaaatgattttaattttatattcagtgaaaagattttatttatggaattaaccatttaataaagaaatatttacctaataaaaaaaaaaaaaaaaaaa

SEQ ID NO: 25 - DNA, 2653 bp, Homo sapiens
atggccctgtccactgagcatcctcccgccacacagaaacccgcccagccggggccaccgaccccaccccctgcctggaaacttaaggaggccggagctgtggggagctcagagctgagatcctacaggagtccagggctggagagaaaacctctgcgaggaaagggaaggagcaagccgtgaatttaagggacgctgtgaagcaatcatggatgcaatgaagagagggctctgctgtgtgctgctgctgtgtggagcagtcttcgtttcgcccagccaggaaatccatgcccgattcagaagaggagccagatcttaccaagtgatctgcagagatgaaaaaacgcagatgatataccagcaacatcagtcatggctgcgccctgtgctcagaagcaaccgggtggaatattgctggtgcaacagtggcagggcacagtgccactcagtgcctgtcaaaagttgcagcgagccaaggtgtttcaacgggggcacctgccagcaggccctgtacttctcagatttcgtgtgccagtgccccgaaggatttgctgggaagtgctgtgaaatagataccagggccacgtgctacgaggaccagggcatcagctacaggggcacgtggagcacagcggagagtggcgccgagtgcaccaactggaacagcagcgcgttggcccagaagccctacagcgggcggaggccagacgccatcaggctgggcctggggaaccacaactactgcagaaacccagatcgagactcaaagccctggtgctacgtctttaaggcggggaagtacagctcagagttctgcagcacccctgcctgctctgagggaaacagtgactgctactttgggaatgggtcagcctaccgtggcacgcacagcctcaccgagtcgggtgcctcctgcctcccgtggaattccatgatcctgataggcaaggtttacacagcacagaaccccagtgcccaggcactgggcctgggcaaacataattactgccggaatcctgatggggatgccaagccctggtgccacgtgctgaagaaccgcaggctgacgtgggagtactgtgatgtgccctcctgctccacctgcggcctgagacagtacagccagcctcagtttcgcatcaaaggagggctcttcgccgacatcgcctcccacccctggcaggctgccatctttgccaagcacaggaggtcgcccggagagcggttcctgtgcgggggcatactcatcagctcctgctggattctctctgccgcccactgcttccaggagaggtttccgccccaccacctgacggtgatcttgggcagaacataccgggtggtccctggcgaggaggagcagaaatttgaagtcgaaaaatacattgtccataaggaattcgatgatgacacttacgacaatgacattgcgctgctgcagctgaaatcggattcgtcccgctgtgcccaggagagcagcgtggtccgcactgtgtgccttcccccggcggacctgcagctgccggactggacggagtgtgagctctccggctacggcaagcatgaggccttgtctcctttctattcggagcggctgaaggaggctcatgtcagactgtacccatccagccgctgcacatcacaacatttacttaacagaacagtcaccgacaacatgctgtgtgctggagacactcggagcggcgggccccaggcaaacttgcacgacgcctgccagggcgattcgggaggccccctggtgtgtctgaacgatggccgcatgactttggtgggcatcatcagctggggcctgggctgtggacagaaggatgtcccgggtgtgtacaccaaggttaccaactacctagactggattcgtgacaacatgcgaccgtgaccaggaacacccgactcctcaaaagcaaatgagatcccgcctcttcttcttcagaagacactgcaaaggcgcagtgcttctctacagacttctccagacccaccacaccgcagaagcgggacgagaccctacaggagagggaagagtgcattttcccagatacttcccattttggaagttttcaggacttggtctgatttcaggatactctgtcagatgggaagacatgaatgcacactagcctctccaggaatgcctcctccctgggcagaaagtggccatgccaccctgttttcagctaaagcccaacctcctgacctgtcaccgtgagcagctttggaaacaggaccacaaaaatgaaagcatgtctcaatagtaaaagataacaagatctttcaggaaagacggattgcattagaaatagacagtatatttatagtcacaagagcccagcagggcctcaaagttggggcaggctggctggcccgtcatgttcctcaaaagcacccttgacgtcaagtctccttcccctttccccactccctggctctcagaaggtattccttttgtgtacagtgtgtaaagtgtaaatcctttttctttataaactttagagtagcatgagagaattgtatcatttgaacaactaggcttcagcatatttatagcaatccatgttagtttttactttctgttgccacaaccctgttttatactgtacttaataaattcagatatatttttcacagtttttcc

SEQ ID NO: 26 - DNA, 6802 bp, Homo sapiens
cggccccagaaaacccgagcgagtagggggcggcgcgcaggagggaggagaactgggggcgcgggaggctggtgggtgtcgggggtggagatgtagaagatgtgacgccgcggcccggcgggtgccagattagcggacggctgcccgcggttgcaacgggatcccgggcgctgcagcttgggaggcggctctccccaggcggcgtccgcggagacacccatccgtgaaccccaggtcccgggccgccggctcgccgcgcaccaggggccggcggacagaagagcggccgagcggctcgaggctgggggaccgcgggcgcggccgcgcgctgccgggcgggaggctggggggccggggccggggccgtgccccggagcgggtcggaggccggggccggggccgggggacggcggctccccgcgcggctccagcggctcggggatcccggccgggccccgcagggaccatggcagccgggagcatcaccacgctgcccgccttgcccgaggatggcggcagcggcgccttcccgcccggccacttcaaggaccccaagcggctgtactgcaaaaacgggggcttcttcctgcgcatccaccccgacggccgagttgacggggtccgggagaagagcgaccctcacatcaagctacaacttcaagcagaagagagaggagttgtgtctatcaaaggagtgtgtgctaaccgttacctggctatgaaggaagatggaagattactggcttctaaatgtgttacggatgagtgtttcttttttgaacgattggaatctaataactacaatacttaccggtcaaggaaatacaccagttggtatgtggcactgaaacgaactgggcagtataaacttggatccaaaacaggacctgggcagaaagctatactttttcttccaatgtctgctaagagctgattttaatggccacatctaatctcatttcacatgaaagaagaagtatattttagaaatttgttaatgagagtaaaagaaaataaatgtgtatagctcagtttggataattggtcaaacaattttttatccagtagtaaaatatgtaaccattgtcccagtaaagaaaaataacaaaagttgtaaaatgtatattctcccttttatattgcatctgctgttacccagtgaagcttacctagagcaatgatctttttcacgcatttgctttattcgaaaagaggcttttaaaatgtgcatgtttagaaacaaaatttcttcatggaaatcatatacattagaaaatcacagtcagatgtttaatcaatccaaaatgtccactatttcttatgtcattcgttagtctacatgtttctaaacatataaatgtgaatttaatcaattcctttcatagttttataattctctggcagttccttatgatagagtttataaaacagtcctgtgtaaactgctggaagttcttccacagtcaggtcaattttgtcaaacccttctctgtacccatacagcagcagcctagcaactctgctggtgatgggagttgtattttcagtcttcgccaggtcattgagatccatccactcacatcttaagcattcttcctggcaaaaatttatggtgaatgaatatggctttaggcggcagatgatatacatatctgacttcccaaaagctccaggatttgtgtgctgttgccgaatactcaggacggacctgaattctgattttataccagtctcttcaaaaacttctcgaaccgctgtgtctcctacgtaaaaaaagagatgtacaaatcaataataattacacttttagaaactgtatcatcaaagattttcagttaaagtagcattatgtaaaggctcaaaacattaccctaacaaagtaaagttttcaatacaaattctttgccttgtggatatcaagaaatcccaaaatattttcttaccactgtaaattcaagaagcttttgaaatgctgaatatttctttggctgctacttggaggcttatctacctgtacatttttggggtcagctctttttaacttcttgctgctctttttcccaaaaggtaaaaatatagattgaaaagttaaaacattttgcatggctgcagttcctttgtttcttgagataagattccaaagaacttagattcatttcttcaacaccgaaatgctggaggtgtttgatcagttttcaagaaacttggaatataaataattttataattcaacaaaggttttcacattttataaggttgatttttcaattaaatgcaaatttgtgtggcaggatttttattgccattaacatatttttgtggctgctttttctacacatccagatggtccctctaactgggctttctctaattttgtgatgttctgtcattgtctcccaaagtatttaggagaagccctttaaaaagctgccttcctctaccactttgctggaaagcttcacaattgtcacagacaaagatttttgttccaatactcgttttgcctctatttttcttgtttgtcaaatagtaaatgatatttgcccttgcagtaattctactggtgaaaaacatgcaaagaagaggaagtcacagaaacatgtctcaattcccatgtgctgtgactgtagactgtcttaccatagactgtcttacccatcccctggatatgctcttgttttttccctctaatagctatggaaagatgcatagaaagagtataatgttttaaaacataaggcattcatctgccatttttcaattacatgctgacttcccttacaattgagatttgcccataggttaaacatggttagaaacaactgaaagcataaaagaaaaatctaggccgggtgcagtggctcatgcctatattccctgcactttgggaggccaaagcaggaggatcgcttgagcccaggagttcaagaccaacctggtgaaaccccgtctctacaaaaaaacacaaaaaatagccaggcatggtggcgtgtacatgtggtctcagatacttgggaggctgaggtgggagggttgatcacttgaggctgagaggtcaaggttgcagtgagccataatcgtgccactgcagtccagcctaggcaacagagtgagactttgtctcaaaaaaagagaaattttccttaataagaaaagtaatttttactctgatgtgcaatacatttgttattaaatttattatttaagatggtagcactagtcttaaattgtataaaatatcccctaacatgtttaaatgtccatttttattcattatgctttgaaaaataattatggggaaatacatgtttgttattaaatttattattaaagatagtagcactagtcttaaatttgatataacatctcctaacttgtttaaatgtccatttttattctttatgcttgaaaataaattatggggatcctatttagctcttagtaccactaatcaaaagttcggcatgtagctcatgatctatgctgtttctatgtcgtggaagcaccggatgggggtagtgagcaaatctgccctgctcagcagtcaccatagcagctgactgaaaatcagcactgcctgagtagttttgatcagtttaacttgaatcactaactgactgaaaattgaatgggcaaataagtgcttttgtctccagagtatgcgggagacccttccacctcaagatggatatttcttccccaaggatttcaagatgaattgaaatttttaatcaagatagtgtgctttattctgttgtattttttattattttaatatactgtaagccaaactgaaataacatttgctgttttataggtttgaagaacataggaaaaactaagaggttttgtttttatttttgctgatgaagagatatgtttaaatatgttgtattgttttgtttagttacaggacaataatgaaatggagtttatatttgttatttctattttgttatatttaataatagaattagattgaaataaaatataatgggaaataatctgcagaatgtgggtttcctggtgtttcctctgactctagtgcactgatgatctctgataaggctcagctgctttatagttctctggctaatgcagcagatactcttcctgccagtggtaatacgattttttaagaaggcagtttgtcaattttaatcttgtggatacctttatactcttagggtattattttatacaaaagccttgaggattgcattctattttctatatgaccctcttgatatttaaaaaacactatggataacaattcttcatttacctagtattatgaaagaatgaaggagttcaaacaaatgtgtttcccagttaactagggtttactgtttgagccaatataaatgtttaactgtttgtgatggcagtattcctaaagtacattgcatgttttcctaaatacagagtttaaataatttcagtaattcttagatgattcagcttcatcattaagaatatcttttgttttatgttgagttagaaatgccttcatatagacatagtctttcagacctctactgtcagttttcatttctagctgctttcagggttttatgaattttcaggcaaagctttaatttatactaagcttaggaagtatggctaatgccaacggcagtttttttcttcttaattccacatgactgaggcatatatgatctctgggtaggtgagttgttgtgacaaccacaagcactttttttttttttaaagaaaaaaaggtagtgaatttttaatcatctggactttaagaaggattctggagtatacttaggcctgaaattatatatatttggcttggaaatgtgtttttcttcaattacatctacaagtaagtacagctgaaattcagaggacccataagagttcacatgaaaaaaatcaattcatttgaaaaggcaagatgcaggagagaggaagccttgcaaacctgcagactgctttttgcccaatatagattgggtaaggctgcaaaacataagcttaattagctcacatgctctgctctcacgtggcaccagtggatagtgtgagagaattaggctgtagaacaaatggccttctctttcagcattcacaccactacaaaatcatcttttatatcaacagaagaataagcataaactaagcaaaaggtcaataagtacctgaaaccaagattggctagagatatatcttaatgcaatccattttctgatggattgttacgagttggctatataatgtatgtatggtattttgatttgtgtaaaagttttaaaaatcaagctttaagtacatggacatttttaaataaaatatttaaagacaatttagaaaattgccttaatatcattgttggctaaatagaataggggacatgcatattaaggaaaaggtcatggagaaataatattggtatcaaacaaatacattgatttgtcatgatacacattgaatttgatccaatagtttaaggaataggtaggaaaatttggtttctatttttcgatttcctgtaaatcagtgacataaataattcttagcttattttatatttccttgtcttaaatactgagctcagtaagttgtgttaggggattatttctcagttgagactttcttatatgacattttactatgttttgacttcctgactattaaaaataaatagtagaaacaattttcataaagtgaagaattatataatcactgctttataactgactttattatatttatttcaaagttcatttaaaggctactattcatcctctgtgatggaatggtcaggaatttgttttctcatagtttaattccaacaacaatattagtcgtatccaaaataacctttaatgctaaactttactgatgtatatccaaagcttctccttttcagacagattaatccagaagcagtcataaacagaagaataggtggtatgttcctaatgatattatttctactaatggaataaactgtaatattagaaattatgctgctaattatatcagctctgaggtaatttctgaaatgttcagactcagtcggaacaaattggaaaatttaaatttttattcttagctataaagcaagaaagtaaacacattaatttcctcaacatttttaagccaattaaaaatataaaagatacacaccaatatcttcttcaggctctgacaggcctcctggaaacttccacatatttttcaactgcagtataaagtcagaaaataaagttaacataactttcactaacacacacatatgtagatttcacaaaatccacctataattggtcaaagtggttgagaatatattttttagtaattgcatgcaaaatttttctagcttccatcctttctccctcgtttcttctttttttgggggagctggtaactgatgaaatcttttcccaccttttctcttcaggaaatataagtggttttgtttggttaacgtgatacattctgtatgaatgaaacattggagggaaacatctactgaatttctgtaatttaaaatattttgctgctagttaactatgaacagatagaagaatcttacagatgctgctataaataagtagaaaatataaatttcatcactaaaatatgctattttaaaatctatttcctatattgtatttctaatcagatgtattactcttattatttctattgtatgtgttaatgattttatgtaaaaatgtaattgcttttcatgagtagtatgaataaaattgattagtttgtgttttcttgtctcccgaaaaaaaaaaaaaaaaaaaaaaaaaaaaaa

SEQ ID NO: 27 - DNA, 794 bp, Homo sapiens
ttttttttttttttgggaattagaaatattgatccagaatataagaaggttggtaaaatattataaaggtctcggtataaataaagggagtttttaaaaaacaattctatatcaaataacgcaaagtagctattttacagcagctaaaactaagggctatcgggaaacatttaaagaattaccaagttggagaaactctaaaaaaattcacagaggctatcagctcacaggtggttaagctagcgaattttaaaaagtgagcactttcaggttacaacacgagtagaacaatacgtgacaaagtgccaaacgtttagctccacagtggtgctttaataccgtgcacaagtacatttcaagcgaaggttttctctaatccaagcgtatagcaacatatcaaataatgaaggaaacaaatctcatgcaaaagtaaataaatctggagggtctaaaaacctggattagaactagaaaagaaggggacagggttttattatcttggcataacgttctaacaaaagcagattatcagggggctctaactcactggccattcctggacatgagcactataagtgaatacctaggagttctacaaacagaacatttttccacatgaatttgatctgtgcaaaagtgtgcccacaggcactggtagaacccagaattaactaagtacggatcaggtgaatgtgggggacatccgtgttttacttgcttgttctgctgaggcgattttccccgattagcagatgaatggctgcggaaacgatgacgtaccactcaagattgtc

SEQ ID NO: 28 - DNA, 4711 bp, Homo sapiens
gccccgggaagcgcagccatggctctgcggaggctgggggccgcgctgctgctgctgccgctgctcgccgccgtggaagaaacgctaatggactccactacagcgactgctgagctgggctggatggtgcatcctccatcagggtgggaagaggtgagtggctacgatgagaacatgaacacgatccgcacgtaccaggtgtgcaacgtgtttgagtcaagccagaacaactggctacggaccaagtttatccggcgccgtggcgcccaccgcatccacgtggagatgaagttttcggtgcgtgactgcagcagcatccccagcgtgcctggctcctgcaaggagaccttcaacctctattactatgaggctgactttgactcggccaccaagaccttccccaactggatggagaatccatgggtgaaggtggataccattgcagccgacgagagcttctcccaggtggacctgggtggccgcgtcatgaaaatcaacaccgaggtgcggagcttcggacctgtgtcccgcagcggcttctacctggccttccaggactatggcggctgcatgtccctcatcgccgtgcgtgtcttctaccgcaagtgcccccgcatcatccagaatggcgccatcttccaggaaaccctgtcgggggctgagagcacatcgctggtggctgcccggggcagctgcatcgccaatgcggaagaggtggatgtacccatcaagctctactgtaacggggacggcgagtggctggtgcccatcgggcgctgcatgtgcaaagcaggcttcgaggccgttgagaatggcaccgtctgccgaggttgtccatctgggactttcaaggccaaccaaggggatgaggcctgtacccactgtcccatcaacagccggaccacttctgaaggggccaccaactgtgtctgccgcaatggctactacagagcagacctggaccccctggacatgccctgcacaaccatcccctccgcgccccaggctgtgatttccagtgtcaatgagacctccctcatgctggagtggacccctccccgcgactccggaggccgagaggacctcgtctacaacatcatctgcaagagctgtggctcgggccggggtgcctgcacccgctgcggggacaatgtacagtacgcaccacgccagctaggcctgaccgagccacgcatttacatcagtgacctgctggcccacacccagtacaccttcgagatccaggctgtgaacggcgttactgaccagagccccttctcgcctcagttcgcctctgtgaacatcaccaccaaccaggcagctccatcggcagtgtccatcatgcatcaggtgagccgcaccgtggacagcattaccctgtcgtggtcccagccggaccagcccaatggcgtgatcctggactatgagctgcagtactatgagaaggagctcagtgagtacaacgccacagccataaaaagccccaccaacacggtcaccgtgcagggcctcaaagccggcgccatctatgtcttccaggtgcgggcacgcaccgtggcaggctacgggcgctacagcggcaagatgtacttccagaccatgacagaagccgagtaccagacaagcatccaggagaagttgccactcatcatcggctcctcggccgctggcctggtcttcctcattgctgtggttgtcatcgccatcgtgtgtaacagaagacgggggtttgagcgtgctgactcggagtacacggacaagctgcaacactacaccagtggccacatgaccccaggcatgaagatctacatcgatcctttcacctacgaggaccccaacgaggcagtgcgggagtttgccaaggaaattgacatctcctgtgtcaaaattgagcaggtgatcggagcaggggagtttggcgaggtctgcagtggccacctgaagctgccaggcaagagagagatctttgtggccatcaagacgctcaagtcgggctacacggagaagcagcgccgggacttcctgagcgaagcctccatcatgggccagttcgaccatcccaacgtcatccacctggagggtgtcgtgaccaagagcacacctgtgatgatcatcaccgagttcatggagaatggctccctggactcctttctccggcaaaacgatgggcagttcacagtcatccagctggtgggcatgcttcggggcatcgcagctggcatgaagtacctggcagacatgaactatgttcaccgtgacctggctgcccgcaacatcctcgtcaacagcaacctggtctgcaaggtgtcggactttgggctctcacgctttctagaggacgatacctcagaccccacctacaccagtgccctgggcggaaagatccccatccgctggacagccccggaagccatccagtaccggaagttcacctcggccagtgatgtgtggagctacggcattgtcatgtgggaggtgatgtcctatggggagcggccctactgggacatgaccaaccaggatgtaatcaatgccattgagcaggactatcggctgccaccgcccatggactgcccgagcgccctgcaccaactcatgctggactgttggcagaaggaccgcaaccaccggcccaagttcggccaaattgtcaacacgctagacaagatgatccgcaatcccaacagcctcaaagccatggcgcccctctcctctggcatcaacctgccgctgctggaccgcacgatccccgactacaccagctttaacacggtggacgagtggctggaggccatcaagatggggcagtacaaggagagcttcgccaatgccggcttcacctcctttgacgtcgtgtctcagatgatgatggaggacattctccgggttggggtcactttggctggccaccagaaaaaaatcctgaacagtatccaggtgatgcgggcgcagatgaaccagattcagtctgtggaggtttgacattcacctgcctcggctcacctcttcctccaagccccgccccctctgccccacgtgccggccctcctggtgctctatccactgcagggccagccactcgccaggaggccacgggccacgggaagaaccaagcggtgccagccacgagacgtcaccaagaaaacatgcaactcaaacgacggaaaaaaaaagggaatgggaaaaaagaaaacagatcctgggagggggcgggaaatacaaggaatattttttaaagaggattctcataaggaaagcaatgactgttcttgcgggggataaaaaagggcttgggagattcatgcgatgtgtccaatcggagacaaaagcagtttctctccaactccctctgggaaggtgacctggccagagccaagaaacactttcagaaaaacaaatgtgaaggggagagacaggggccgcccttggctcctgtccctgctgctcctctaggcctcactcaacaaccaagcgcctggaggacgggacagatggacagacagccaccctgagaacccctctgggaaaatctattcctgccaccactgggcaaacagaagaatttttctgtctttggagagtattttagaaactccaatgaaagacactgtttctcctgttggctcacagggctgaaaggggcttttgtcctcctgggtcagggagaacgcggggaccccagaaaggtcagccttcctgaggatgggcaacccccaggtctgcagctccaggtacatatcacgcgcacagcctggcagcctggccctcctggtgcccactcccgccagcccctgcctcgaggactgatactgcagtgactgccgtcagctccgactgccgctgagaagggttgatcctgcatctgggtttgtttacagcaattcctggactcgggggtattttggtcacagggtggttttggtttagggggtttgtttgttgggttgttttttgttttttggttttttttaatgacaatgaagtgacactttgacatttcctaccttttgaggacttgatccttctccaggaagaaggtgctttctgcttactgacttaggcaatacaccaagggcgagattttatatgcacatttctggatttttttatacggttttcattgacactcttccctcctcccacctgccaccaggcctcaccaaagcccactgccatggggccatctgggccattcagagactggagtgagatttgggtgtggagggggaggcgccaaggtggaggagcttcccactccaggactgttgatgaaagggacagattgaggaggaagtgggctctgaggctgcagggctggaagtccttgcccacttcccactctcctgccccaatctatctagtacttcccaggcaaataggcccctttgaggctcctgagtgccctcagatggtcaaaacccagttttccctctgggagcctaaaccaggctgcatcggaggccaggacccggatcattcactgtgataccctgccctccagagggtgcgctcagagacacgggcaagcatgcctcttcccttccctggagagaaagtgtgtgatttctctcccacctccttccccccaccagacctttgctgggcctaaaggtcttggccatggggacgccctcagtctagggatctggccacagactccctcctgtgaaccaacacagacacccaagcagagcaatcagttagtgaattg

SEQ ID NO: 29 - DNA, 3063 bp, Homo sapiens
agcggggcagaagaggaagatttctgaagagtgcagctgcctgaaccgagccctgccgaacagctgagaattgcactgcaaccatgagtgagaacaataagaattccttggagagcagcctacggcaactaaaatgccatttcacctggaacttgatggagggagaaaactccttggatgattttgaagacaaagtattttaccggactgagtttcagaatcgtgaattcaaagccacaatgtgcaacctactggcctatctaaagcacctcaaagggcaaaacgaggcagccctggaatgcttacgtaaagctgaagagttaatccagcaagagcatgctgaccaggcagaaatcagaagtctggtcacctggggaaactatgcctgggtctactatcacatgggccgactctcagacgttcagatttatgtagacaaggtgagacatgtctgtgagaagttttccagtccctatagaattgagagtccagagcttgactgtgaggaagggtggacacggttaaagtgtggaggaaaccaaaatgaaagagcgaaggtgtgctttgagaaggctctggaaaagaagccaaagaacccagaattcacctctggactggcaatagcaagctaccgtctggacaactggccaccatctcagaacgccattgaccctctgaggcaagccattcggctgaatcctgacaaccagtaccttaaagtcctcctggctctgaagcttcataagatgcgtgaagaaggtgaagaggaaggtgaaggagagaagttagttgaagaagccttggagaaagccccaggtgtaacagatgtacttcgcagtgcagccaagttttatcgaagaaaagatgagccagacaaagcgattgaactgcttaaaaaggctttagaatacataccaaacaatgcctacctgcattgccaaattgggtgctgctatagggcaaaagtcttccaagtaatgaatctaagagagaatggaatgtatgggaaaagaaagttactggaactaataggacacgctgtggctcatctgaagaaagctgatgaggccaatgataatctcttccgtgtctgttccattcttgccagcctccatgctctagcagatcagtatgaagaagcagagtattacttccaaaaggaattcagtaaagagcttactcctgtagcgaaacaactgctccatctgcggtatggcaactttcagctgtaccaaatgaagtgtgaagacaaggccatccaccactttatagagggtgtaaaaataaaccagaaatcaagggagaaagaaaagatgaaagacaaactgcaaaaaattgccaaaatgcgactttctaaaaatggagcagattctgaggctttgcatgtcttggcattccttcaggagctgaatgaaaaaatgcaacaagcagatgaagactctgagaggggtttggagtctggaagcctcatcccttcagcatcaagctggaatggggaatggagaatagagatgtggtgcccactaggctactgctgatagggagctgaaattcctccaccaagttggtattcaaaatatgtaatgactggtatggcaaaagattggactaagacactggccataccactggacagggttatgttaacacctgaattgctgggtcttgagagagcccaaggagttctgggagagggaccagattggggggtaggtccacgggcttggtgatagaattatttctcgattgacttcttgagtgcaatttgaactgtaacatttgcttagtcacctttagtggagtaatccactgggcttgtttctatatttatataaagcagccaaatccttcatgtaatattgaagtccatttttgcaatgttgttccatacttggagtcattttgcatcccatagaggttagtcctgcatagccagtaatgtgctaagttcatccaaaagctgggggaccaaagtctaaatagggctcagtatcccccatcgcttatctctgcctccttcctcctccttcccagtctatcatcaaccttgagtattctacacaatgtgaattcaagtgcctgattaattgaggtggcaacatagtttgagacgagggcagagaacaggaagatacatagctagaagcgacgggtacaaaaagcaatgtgtacaagaagactttcagcaagtatacagagagttcacctctactctgccctcctcatagtcataatgtagcaagtaaagaatgagaatggattctgtacaatacactagaaaccaacataatgtatttctttaaaacctgtgtgaaaaaataaatgttccaccagtagggataggggaaaagtaaccaaaagagagaaagagaaaggaatgctggtttatctttgtagattgtaatcgaatggagaaatttgcagtattttagccactattaggaattttttttttttgtaaaatgaagactgaactctgttcaaatgctttcatgaacctggtttgagacggtaggaaagcaacaaaacgtgggaacctggtgactaagggcctggtgcaaggacttgggaaatgtcattaataatagatggtggggttttcccccctttagaaatgttggatattaagtgatataaacacttcttttaactccgaaaatcttctgagaaatcacaaaattcacggtatgcttggaacgattgagattttctaggtagatgctgaatagcctagacatcaaagttggtgtgaaccaaaatagagtcagctgacccagcatcagccacactctgggttggaaaatgtttgcctgttggaattaatttaagcttaagtatatatcaacattattttattgtgcaattaaaacaatacaaattcatggttttttaaagttaaaaattctaaccactgtaacaacagtttttgtgttattttctgtattaaacatcttgttgcacgcatttgaggtcatcagggtgcaaaatttgtattcctgaaaatgtcatatattttcattaataaataacctaaatatgataaaacataaaaaaaaaaaaaaa

SEQ ID NO: 30 - DNA, 2742 bp, Homo sapiens
ctagtattctactagaactggaagattgctctccgagttttttttttgttattttgttaaaaaataaaaagcttgagcagcaattcatattactgtcacaggtatttttgctgtgctgtgcaaggtaactctgctagctaagattcacaatgttgaaagcccttttcctaactatgctgactctggcgctggtcaagtcacaggacaccgaagaaaccatcacgtacacgcaatgcactgacggatatgagtgggatcctgtgagacagcaatgcaaagatattgatgaatgtgacattgtcccagacgcttgtaaaggtggaatgaagtgtgtcaaccactatggaggatacctctgccttccgaaaacagcccagattattgtcaataatgaacagcctcagcaggaaacacaaccagcagaaggaacctcaggggcaaccaccggggttgtagctgccagcagcatggcaaccagtggagtgttgcccgggggtggttttgtggccagtgctgctgcagtcgcaggccctgaaatgcagactggccgaaataactttgtcatccggcggaacccagctgaccctcagcgcattccctccaacccttcccaccgtatccagtgtgcagcaggctacgagcaaagtgaacacaacgtgtgccaagacatagacgagtgcactgcagggacgcacaactgtagagcagaccaagtgtgcatcaatttacggggatcctttgcatgtcagtgccctcctggatatcagaagcgaggggagcagtgcgtagacatagatgaatgtaccatccctccatattgccaccaaagatgcgtgaatacaccaggctcattttattgccagtgcagtcctgggtttcaattggcagcaaacaactatacctgcgtagatataaatgaatgtgatgccagcaatcaatgtgctcagcagtgctacaacattcttggttcattcatctgtcagtgcaatcaaggatatgagctaagcagtgacaggctcaactgtgaagacattgatgaatgcagaacctcaagctacctgtgtcaatatcaatgtgtcaatgaacctgggaaattctcatgtatgtgcccccagggataccaagtggtgagaagtagaacatgtcaagatataaatgagtgtgagaccacaaatgaatgccgggaggatgaaatgtgttggaattatcatggcggcttccgttgttatccacgaaatccttgtcaagatccctacattctaacaccagagaaccgatgtgtttgcccagtctcaaatgccatgtgccgagaactgccccagtcaatagtctacaaatacatgagcatccgatctgataggtctgtgccatcagacatcttccagatacaggccacaactatttatgccaacaccatcaatacttttcggattaaatctggaaatgaaaatggagagttctacctacgacaaacaagtcctgtaagtgcaatgcttgtgctcgtgaagtcattatcaggaccaagagaacatatcgtggacctggagatgctgacagtcagcagtatagggaccttccgcacaagctctgtgttaagattgacaataatagtggggccattttcattttagtcttttctaagagtcaaccacaggcatttaagtcagccaaagaatattgttaccttaaagcactattttatttatagatatatctagtgcatctacatctctatactgtacactcacccataacaaacaattacaccatggtataaagtgggcatttaatatgtaaagattcaaagtttgtctttattactatatgtaaattagacattaatccactaaactggtcttcttcaagagagctaagtatacactatctggtgaaacttggattctttcctataaaagtgggaccaagcaatgatgatcttctgtggtgcttaaggaaacttactagagctccactaacagtctcataaggaggcagccatcataaccattgaatagcatgcaagggtaagaatgagtttttaactgctttgtaagaaaatggaaaaggtcaataaagatatatttctttagaaaatggggatctgccatatttgtgttggtttttattttcatatccagcctaaaggtggttgtttattatatagtaataaatcattgctgtacaacatgctggtttctgtagggtatttttaattttgtcagaaattttagattgtgaatattttgtaaaaaacagtaagcaaaattttccagaattcccaaaatgaaccagataccccctagaaaattatactattgagaaatctatggggaggatatgagaaaataaattccttctaaaccacattggaactgacctgaagaagcaaactcggaaaatataataacatccctgaattcaggcattcacaagatgcagaacaaaatggataaaaggtatttcactggagaagttttaatttctaagtaaaatttaaatcctaacacttcactaatttataactaaaatttctcatcttcgtacttgatgctcacagaggaagaaaatgatgatggtttttattcctggcatccagagtgacagtgaacttaagcaaattaccctcctacccaattctatggaatattttatacgtctccttgtttaaaatctgactgctttactttgatgtatcatatttttaaataaaaataaatattcctttagaagatcactctaaaa

SEQ ID NO: 31 - DNA, 489 bp, Homo sapiens
tttttttttggaaaacaatatattaatttattcccaagaaaacaaaacatggaacctcatcgaaaacaaacatcagatacagtagtttcagggcattcccatgggctgtcagaaacccactagcccaaacactatgctcttccaacattaaagtatttaagacacaggagagatgaccaacaacagacatgtaaacatcaattccagaaagatttcttgttctacatgagaaacatccagtgtaaaacggttcctcttctcaggtgctgtcatttaaataagttgaaaagagacaatttttaaactccactgctgaccctgagtgcattcgctatcccctcacctattttgttttgggacaaagtctcgctctgtctcaaaaaaaaaaaagaaaacagatatttgtatgctaatgtcaacccaaatgtccatcaatggatgaatggataagcaaaatgtggtctgttcatacagtggaatatgattcag

SEQ ID NO: 32 - DNA, 2456 bp, Homo sapiens
ataacagcatgaagtgccgtggaactggaataggcgtgtcctctccctcgaccctccccctccttgtccctctgctcacccctcgctcgttccctccctccggcgagggccgcctttataacaactgctcagagtgcgagggcgggatagctgtccaaggtctcccccagcactgaggagctcgcctgctgccctcttgcgcgcgggaagcagcaccaagttcacggccaacgccttggcactagggtccagaatggctacaacagtccctgatggttgccgcaatggcctgaaatccaagtactacagactttgtgataaggctgaagcttggggcatcgtcctagaaacggtggccacagccggggttgtgacctcggtggccttcatgctcactctcccgatcctcgtctgcaaggtgcaggactccaacaggcgaaaaatgctgcctactcagtttctcttcctcctgggtgtgttgggcatctttggcctcaccttcgccttcatcatcggactggacgggagcacagggcccacacgcttcttcctctttgggatcctcttttccatctgcttctcctgcctgctggctcatgctgtcagtctgaccaagctcgtccgggggaggaagcccctttccctgttggtgattctgggtctggccgtgggcttcagcctagtccaggatgttatcgctattgaatatattgtcctgaccatgaataggaccaacgtcaatgtcttttctgagctttccgctcctcgtcgcaatgaagactttgtcctcctgctcacctacgtcctcttcttgatggcgctgaccttcctcatgtcctccttcaccttctgtggttccttcacgggctggaagagacatggggcccacatctacctcacgatgctcctctccattgccatctgggtggcctggatcaccctgctcatgcttcctgactttgaccgcaggtgggatgacaccatcctcagctccgccttggctgccaatggctgggtgttcctgttggcttatgttagtcccgagttttggctgctcacaaagcaacgaaaccccatggattatcctgttgaggatgctttctgtaaacctcaactcgtgaagaagagctatggtgtggagaacagagcctactctcaagaggaaatcactcaaggttttgaagagacaggggacacgctctatgccccctattccacacattttcagctgcagaaccagcctccccaaaaggaattctccatcccacgggcccacgcttggccgagcccttacaaagactatgaagtaaagaaagagggcagctaactctgtcctgaagagtgggacaaatgcagccgggcggcagatctagcgggagctcaaagggatgtgggcgaaatcttgagtcttctgagaaaactgtacaagacactacgggaacagtttgcctccctcccagcctcaaccacaattcttccatgctggggctgatgtgggctagtaagactccagttcttagaggcgctgtagtatttttttttttttgtctcatcctttggatacttcttttaagtgggagtctcaggcaactcaagtttagacccttactctttttgtttgttttttgaaacaggatcttgctctgtcacccaggcttgagtgcagtggtgcgatcacagcccagtgcagcctcgaccacctgtgctcaagcaatcctcccatctccatctcccaaagtgctgggatgacaggcgtgagccacagctcccagcctaggcccttaatcttgctgttattttccatggactaaaggtctggtcatctgagctcacgctggctcacacagctctaggggcctgctcctctaactcacagtgggttttgtgaggctctgtggcccagagcagacctgcatatctgagcaaaaatagcaaaagcctctctcagcccactggcctgaatctacactggaagccaacttgctggcacccccgctccccaacccttcttgcctgggtaggagaggctaaagatcaccctaaatttactcatctctctagtgctgcctcacattgggcctcagcagctccccagcaccaattcacaggtcacccctctcttcttgcactgtccccaaacttgctgtcaattccgagatctaatctccccctacgctctgccaggaattctttcagacctcactagcacaagcccggttgctccttgtcaggagaatttgtagatcattctcacttcaaattcctggggctgatacttctctcatcttgcaccccaacctctgtaaatagatttaccgcatttacggctgcattctgtaagtgggcatggtctcctaatggaggagtgttcattgtataataagttattcacctgagtatgcaataaagatgtggtggccactctttcatggtggtggcagcaaaaaaaaaaaaaa

SEQ ID NO: 33 - DNA, 668 bp, Homo sapiens
  misc_feature (567)..(567): n is a, c, g, or t
  misc_feature (612)..(612): n is a, c, g, or t
  misc_feature (621)..(621): n is a, c, g, or t
  misc_feature (626)..(626): n is a, c, g, or t
  misc_feature (646)..(646): n is a, c, g, or t
accacctgactcagacttctttgtcgttgttttatttaaaatgttattgtctctgattagaaaatacagtcatgagggctaaaaactgaaatgatgtgaaaaggcatccattaagcagtgttgccccaccaccctttccatcagtcttgtctcatggggatggggaaaatgaagacagaacgctttgccttgctttgcaatccctcctttgaaggccttctgtcccaggaagccaatgttcatttgatgtggaagagggacctgtgtttaaccagaagctgtcctccctcatccctttcccatggcttacacgcagaagggagaggagatgaccagaggagaaatcaggggaagaaaaggcaacaggggaggcaaagggaaaggagaggaatgcttaaaatatacagtgaaatttgagtaggattctctactcaaagacttctctgggaagtgtccagaattgaccacacaggtgctgacggtagaaagaacacagacccaaaaccctgatctagttgcattaactccattagccctgagttccctgtaaaatgaagactgtggagnaccactagaggattctgtgacttctcaactctaaaatttggactngacctcgtncgatnttggctcgaggcaaattccnatatggtcgattaatcgaacca

SEQ ID NO: 34 - DNA, 11554 bp, Homo sapiens
ccacaccgagcaccagcttctccgacgccgggaagccgctgtcgccgccgctacctctccctgttgccgccgcctcagatctcttcatgccgctgtaagctcggaggccaaggatgcggagtaggcttcccccagcgcttgccgccctgggcgcggccctgctcctgtcttccattgaggcagaagttgacccaccttcagacttgaattttaaaattatagatgaaaatactgttcatatgtcatgggcaaaaccagttgatccaattgtgggttacagaataacggtggaccctacaacggatgggcctactaaagaatttaccctttcagctagtaccactgaaactttattgtcagaacttgtacctgaaacagagtatgtggtgacaataacttcatatgatgaagtagaagaaagtgtaccagttataggacaactaacaattcaaacaggtagttcgacaaagccagtggagaagaaacctggaaaaaccgagatacaaaaatgctctgtcagtgcctggactgatttggttttcctcgtggatggctcttggagtgtgggaagaaataatttcaagtacattttagacttcattgctgctcttgtgtctgcttttgacattggggaagagaagacaagagttggagttgttcaatacagctctgataccaggactgaatttaacttaaatcagtactaccaaagggatgaacttcttgctgcaataaaaaaaattccatataaaggtggcaacacaatgacaggggatgccattgattatttagttaaaaatactttcacggaatctgctggggcaagagttggctttcctaaagtggcaattattattacggatggaaaatcccaggatgaagtggaaattccagcaagagagcttcgtaatgttggagttgaagttttctccttgggcattaaagctgcagatgcaaaagaactcaaacaaattgcctccacaccttcactgaaccatgttttcaatgtggccaactttgatgcaattgtggatattcagaatgagatcatctcccaggtgtgctcaggtgttgatgaacaacttggtgaattggttagtggagaagaagttgttgagcctccttcaaatttgattgccatggaagtctcttcaaaatatgttaagctaaattggaatccatctcctagtccagtgactggctacaaagtcatcctcacaccaatgactgcaggaagccgacagcacgctctgagtgtggggcctcagacaaccacgctcagtgttcgcgacctctcagcagacacagaataccagatcagtgtttccgccatgaagggaatgacatccagtgaacccatttcaataatggagaagactcagccaatgaaagttcaagtggaatgctcacgtggtgtggatataaaagccgatattgtgtttttggttgatggctcctatagcattgggattgcaaactttgttaaagttagagcctttttggaagttcttgtaaaaagttttgaaatttcaccaaatagggtccagattagtcttgtgcaatacagccgggatcctcatactgagttcactttgaaaaaattcaccaaagttgaagatataattgaagcaataaacaccttcccttacagaggaggatctacaaatactggcaaagcaatgacttatgtcagagagaaaatatttgtgcctagcaagggatcaagaagcaatgtgccaaaggtcatgattcttatcacggatgggaaatcatcagatgctttcagagatcctgcgataaaactgaggaattcagatgttgaaatctttgcagttggtgtgaaggatgccgttcgctcagaattggaagctattgcctctcctcctgcagagacccatgtgttcacagtggaagattttgatgcttttcagaggatatcttttgaactcacacagtctatctgccttagaattgagcaagaattggcagctataaagaagaaagcttacgtccctccaaaggatcttagtttttcagaagtgacttcttatggtttcaaaaccaactggtctccagctggagaaaatgttttttcatatcacatcacctacaaggaagcggctggggatgatgaggtcactgtggtggagccagcatcgagcaccagtgttgttctcagcagcctgaagccagagaccttgtatttggtcaatgtgactgcggagtatgaggatggcttcagcattcccttagctggagaggagaccaccgaagaagtaaaaggagcacctcgaaacctaaaggtgacagatgagactacagatagtttcaaaattacttggactcaagctccagggagagttttaagatatcgaattatatatagaccagttgctggtggagagagcagagaagttaccaccccacccaatcagaggaggagaacactggagaacttgattccagacacgaaatatgaagtatctgtaattcctgaatatttctcaggacctggtactccattaactggaaatgcagccactgaagaagttagagggaatccaagagacttaagagtttctgaccctacgacgtctactatgaaattatcttggagtggggcaccaggaaaagtgaaacagtatctcgtcacatataccccagtggcagggggtgaaactcaagaggtcactgtgaggggagatacaaccaatacggtgctgcagggattgaaggaagggacacaatacgccttatctgtgacagccttgtatgcgtctggggctggagacgccctctttggtgaaggaacaacacttgaagaacgtggttctcctcaagatttagttactaaagacatcactgacacatcaattggggcttattggacatctgctccaggaatggttcgcggttacagggtctcatggaaatcactttatgatgatgttgacactggagagaaaaatctgcctgaagatgcaattcatacgatgatagaaaatctgcagccagagaccaaatacagaatttcagtatttgccacttacagcagtggagaaggagaacctttgactggagatgccacaactgaattatctcaagattccaaaaccctgaaagtagatgaagaaacagaaaacacaatgagagttacatggaaaccagcaccagggaaagtcgtcaactaccgtgttgtctatcgccctcatgggagagggaagcaaatggttgctaaggtgccccccacagtcacttcgacagtgttaaagcgacttcagccacagaccacatatgacatcacagttcttcctatttacaagatgggagaaggaaagcttaggcaaggatcaggaacaacagcttctcggtttaagtctcctagaaacctcaaaacatctgacccaaccatgtcaagcttccgagtgacttgggagcctgcccctggggaagtgaagggttataaagtcacattccaccctacgggggatgacagaagactgggggagttagtggttggaccctatgacaacacagttgttttggaggaacttagggctggtaccacctataaagtaaatgtttttggaatgtttgatggaggagaaagctcaccacttgttggacaagaaatgacaaccctttccgacacaactgttatgccaattttatcttctgggatggagtgtctcaccagagctgaggcagacattgtgttgctggtggatggatcatggagcatcggccgggcaaattttagaaccgtgaggagtttcatttctcgtattgtggaagtctttgacattggccccaaaagagtacaaattgctcttgctcagtatagtggggatcccagaacagagtggcagttaaatgcacacagagacaagaagagcttgttgcaagctgtggcaaacttgccgtacaaaggaggcaatactctcacaggcatggctttgaatttcattcgccaacagaacttcaggacccaagctggcatgagacctcgagctcgaaaaattggtgtgctcattactgatggaaaatcacaagacgatgttgaagcaccttcaaagaaactcaaggatgagggagtggagctgtttgctattggtattaaaaatgctgatgaagtcgaattaaagatgattgcaactgatcctgatgatacccatgcatacaatgtggcagattttgagtcactctccaggatagtggatgatctcaccattaatttgtgtaacagtgtcaaaggtccaggtgatttggaagcaccttctaacttagttatttctgagcgaacccatcgttcttttagagtgagctggacaccaccttctgacagtgtggatcgatataaggtggaatactatccagtttctggagggaaacgtcaagaattttatgtgagtcgaatggaaactagcacagtgctgaaagatctgaaacctgaaactgaatatgttgtcaatgtgtattctgtggtagaagatgaatatagtgagcctctgaaggggacagaaaaaaccttgccagtgcctgtagtcagcctgaatatttatgatgttggccctaccaccatgcatgtgcagtggcagcctgtgggaggagctactggctacatcttgtcatacaaacctgttaaggacacagagccaacaagacccaaagaggtgcgtttggggccaacagtgaatgacatgcagctgactgaccttgttcccaacacggagtatgcagtcacagtccaggctgtcctgcacgacctcactagtgaacctgtcactgttcgggaagtcaccttgcctttacccagacctcaggatctgaaactcagagatgtgactcacagcactatgaatgtcttttgggaacctgtgcctggaaaagtgcgtaaatatattgttcgatacaaaacaccagaagaggatgtcaaagaggtagaggtggacagatcagagaccagcacttccctcaaagacctcttctcacagaccttgtacacagtcagcgtttctgcagtacatgacgagggggagtctcctccagtgactgctcaagaaactacccgacccgtgccagccccaacaaacttaaagattactgaagtaacatcagagggtttcagagggacttgggatcatggagcttcagatgtgtctctctacagaataacttgggcaccttttggaagctcagataagatggagaccatcttaaatggagatgaaaacactttggtgttcgaaaacctgaaccccaacaccatctatgaagtttccattactgccatctatcctgatgagtcagaaagtgatgacctgattggcagtgagcgcactctgcctatcttaacaacacaagctcccaaaagtggcccacgaaaccttcaagtgtacaatgcaacatctaacagcctgactgttaagtgggatcctgctagtggtcgtgtgcagaaatataggatcacttatcagccttccacaggggaaggcaatgagcaaacgaccacaataggaggacggcagaacagtgtggtcctgcagaaactgaagccagacactccttacactatcaccgtatcctctctgtatcctgatggtgaaggaggtcggatgacgggaagaggcaagaccaaacctctaaacactgtaaggaacctgagagtgtatgacccttctaccagcaccttgaatgtccgctgggaccatgcagagggaaatcctcgtcagtacaagctcttctatgcaccagcagcaggtggtccagaggaactggtaccaatccccgggaataccaattatgccattcttaggaatctgcagccagatacctcatacactgtgactgtagttcccgtttatactgaaggtgatgggggacgcacatcagatactggaaggacattgatgagaggactggcaagaaatgtccaagtatacaatcctacacctaacagcctcgatgttcgctgggaccctgctccaggacctgtgctgcaatatcgcgttgtgtattctcctgtggatggcacaagaccctcagaatctatagtagtgccaggaaacacgcgcatggtgcatctggagcggctgattccggacacactctattccgtgaaccttgtggctctgtactcggatggagagggaaatcccagccctgcccagggccgaacgctaccacgcagtggaccaaggaacctgagagtctttggtgaaacaaccaatagcctctcggtagcctgggatcatgctgatgggccagttcagcagtacaggatcatctattctcccactgttggtgatccaattgatgaatataccacagtcccaggcagaagaaacaatgtaatactgcagcccctgcaacctgacactccatataaaattactgttattgctgtttatgaagatggagatggtggccatctaacaggaaatggaagaactgtgggactccttcctcctcagaacatacacatctctgacgaatggtatacaagattcagggtgtcctgggatccttcaccttctccagttcttggatataaaatagtatataagccagtgggttccaatgagcccatggaagcctttgttggagaaatgacatcatataccttacacaatctcaatcccagcaccacctacgatgtgaatgtttatgctcaatatgattctggactcagtgtccccttgacagatcaaggcactacattatatttaaatgtaacagatctgaaaacttaccagattgggtgggatacattctgtgtcaaatggtcacctcaccgggcagccacctcctacaggctaaaactaagccctgcagatggaacaaggggacaagaaattacagtgcgtggatcagaaaccagtcactgcttcactggcctttcaccagacactgattatggtgtcactgtttttgtgcagacaccaaatctcgagggaccaggagtctctgttaaagaacataccactgtgaaaccaacagaagcccctacagagccacccacacctcctccccctcccaccattccaccagcccgggatgtatgcaaaggggccaaggcagatattgtgttcttgactgatgcctcctggagcattggggacgataattttaacaaagttgtaaaattcatcttcaatactgtgggaggctttgatgaaatcagtcctgctgggattcaggtttcatttgtgcaatacagcgatgaggtcaagtctgagttcaagctgaacacgtacaatgacaaggccctagcccttggggccctccagaatattaggtacagaggaggaaacacaagaacaggcaaggccctcacgtttatcaaggagaaagtcttgacttgggagagcggcatgaggaagaatgtccctaaggtgttggttgtggtcacggacggtcggtcccaggatgaggtcaagaaggcggctttggtcatccagcagtcagggttcagtgtctttgtagttggtgtggctgatgtcgactacaatgagcttgccaacattgccagcaaaccaagtgaacggcacgtgttcattgtggacgactttgaatcttttgagaagatcgaagacaatcttattacatttgtttgtgaaactgccacttcaagttgtcctctcatttatttggatggctacacctcaccaggttttaaaatgcttgaagcatacaacctgacagaaaagaattttgcttctgtacaaggagtatctttggagtcagggtctttccccagctactcagcatacaggattcagaagaatgcgtttgtgaatcagcctacagcagacctacacccaaatggactccctccttcatacacgattatattattattcagacttctcccagaaactcccagtgacccttttgcaatttggcaaatcacagacagagactacaaaccacaagttggagtgattgcagatccttctagcaagacgttatcattctttaacaaggatacaagaggcgaggtgcaaactgttacatttgacacagaagaagtaaagacattattttatggaagttttcacaaggttcatattgtagtgacctcaaaaagtgttaagatttacattgactgctatgaaattatagaaaaagacatcaaggaagctggaaatataacaactgatggttatgaaattcttggaaaactccttaaaggggaaaggaaatcagccgcattccaaatccagagttttgacattgtctgcagtccagtgtggaccagtagagacagatgctgtgatattccctctaggagagatgagggaaaatgccctgcttttccaaattcttgcacatgtacacaggacagcgttggacctccaggacctccaggccctgcaggaggacctggtgctaaaggtcccagaggtgaaagaggtatcagtggggcaattgggccccctggtcctcgtggagacataggtcctccaggcccccagggtcctccaggccctcagggacccaatggactctctattccgggagagcaaggtcgccaagggatgaaaggtgatgctggagagccaggacttccaggccgaacaggaaccccaggattacctggcccaccaggaccaatgggacctccaggagacagaggcttcactggaaaagacagtgcaatgggacccaggggcccaccagggcggccgggaagcccaggctccccaggagtcacaggaccaagtgggaagccaggaaaacctggagatcatggcagaccaggtccatctgggttgaaaggagaaaaaggtgataggggagacattgcttcccagaacatgatgcgagcagttgcaagacaagtctgtgaacaattgataagtggtcagatgaacagattcaatcagatgctgaatcagattccaaatgattaccagtccagtcgcaaccagccaggcccgccgggtccaccgggacctcctggtagcgcaggagccagaggagaacctgggcctggggggcggccaggcttcccgggcacaccagggatgcagggaccccctggggaacgaggtttgccaggagagaaaggtgaaaggggtactggatcttcaggacctcgggggctgcctgggcccccaggtccacaaggagaatccagaacaggtccaccagggtccacaggttcaagaggtccccctggcccccctggccgtcctggaaactcaggtatccagggccccccaggtcctcctggatactgtgattcttctcagtgtgccagcatcccatacaacgggcaaagctatccaggttccggctaacacattttctaagtcgccagtgctgcttacagtttgaatacatgaaaatcctgtttctgagatgtttgcgcacgtgcttattaggaaatgagtctgtatggaaatctcaccacagataatggttaacgaaccgggtcgacatcacaaaggagggtggagactctttttactaacttgaatgagacaaaagcagtggtgtcagtttataatcctgatgcatttcagtaataatgtagaaaaacattattttaaaaaagttccaacacacagccatgaggagccatgaggagcctcagttttgaaagaggtgcataataaaactactaaccagaggagtctatgccattttaagaaaaacaattaacctggttaaagagaaatgtcttatgtaaataataaactaattgtggcttgtaaatgatttgtatgtgatcctgtcgactaaaatcacttaacaattctacaataagcttctgcatcaaagcctgccgcttgctctatgccggaataacaccaaatggaatctcctcatctcttgcttgttagcgatgtgtctgattcagggcatctgtctttttgttacttttttgtccgtgtcctctcatttgggttttgtaactgcaattttcaaaccaaagtttaaaatcaccttttcttcctgttttgctgtagtcactggtgttcctcacccaccagctgtaactcagtttgtgtgaggtacagccacagaagatgtcatgtactgtatattacctggtgatagttgcttttcaccccccgagttcagtttctaggagccaatgaaacttcccctcacctcctcatctttccaagttgttctttgaattgaggagtttgaaggcataaacagttacttggggatttgcgaaaatcctacttagttactgcgtttacagttctttggcccagtctctgacccttcccaagtatttgtgcaatgattgtgtttactgctggatttttgaaggtttttttttttaagaaagtgccatttcattatttgattatcaccaaattatctggaaataattgggacattgtaacttatctatttatagttatgagattaagactggagtgccatcaccgcgggtgatgatttagcttttgctgtgtgtgtgtgtgtgtgtgtgccttccaaatcatgccataattgtaatgttgaatcggacagagccttacgtgcccgagggcggggcctacctgcctgagcgcgagcccttcatcgtgccggtggagcccgagcggacagcggaatacgaggactacggcgcagacgagcctgcagaggagcctcctgagccccaccggcgctggcggcgcgccctgccccacggacccgggcagtgaaccagagatcacgcgccgcgccgcgaggcttgggggaggtgttgaaattctcatttacaggtcagatagagcagtgtacgtcttttctgaggtgtttcttccagcgttgctcatccaggagtaccctttctgattgtagagaaccttgtttctgcaggaagcctagctccaagcacgcagtctgtagacatttttgcctttgcccttgaaatgcttgcaaaatactttgttaacaaaagctgcaaagagagaacatgccgtgtgcctttagttagcacagcgggcagcctcagtgaaactcttaggttaagcagttaagtcctggaacccagagctgctgtgtatttcgagcgggcagtttatcttttgctatacttattttcaattcaattacaccacgattcaaataattcccctcctaaaaccaaaaaggagggaaacgtcaactccattgcaattacttatcttcctcttctatctctgttatacgccggggcatagaatgctcgtatacatctctttaacaaccacaaaccttaagccatgtagatgaagttagtgcatcaacgggatacagttccatattgccttaaacctccttgttttagacacactaacatttataccaaattgcagattattctgcagagagggaattgcatgtttgtgttgtatatttagtatgaacttttttcagaatataatatttcttagttatcaaaagtagttggaaaacatttgcaagactatgaacatagaattgctgcttttatattttaactgcagattgtgaatttcactgccttatattatttatttctgaaacaaaagaggcatttttcaataaaactactgaaaatttgaaaaaaaaaaaaaaa

SEQ ID NO: 35 - DNA, 2362 bp, Homo sapiens
acctgattccgttcctcagctcgcattcctccgcccgtcccgctcccgccgccagcggaggccctagtctcccgctccaactattccaaccatcccgggaagggtggggcgctcggctcttgggtccccctccgccgccccgcctcgtcgatctccccttctaccccggtccctccctttctggggtggggccagccaatcagcgatcagactccggagtttggcccgggagctggggagctcaccgatcccccgcccagcagttctggccgctgtcccggtgcgcacggacgtggctcgagtttcctctgctctccgctctcgcccgctagctctcctcccttccgctcctgcttctctccgggtctcccgctccagctccagccccacccggccggtcccgcacggctccgggtagccatggaggaccccacgctctatattgtcgagcggccgcttcccgggtaccccgacgccgaggccccggagccttcctccgctggggctcaggcagcggaggagccgtcgggggccggctcagaagagctgatcaagtcggaccaggtgaacggcgtgctggtgctgagcctcctggacaaaatcatcggggccgtagaccagatccagctgactcaagcacagctggaggagcggcaggcggagatggagggcgcagtgcagagcatccagggcgagctgagcaagctgggcaaggcgcacgccaccacgagcaatacggtgagcaagctgctggagaaggtgcgcaaggtcagcgtcaacgtgaagaccgtgcgcggcagcctggagcgccaggcggggcagatcaagaagctggaggtcaacgaggccgagctgctgcggcgccgcaactttaaagtcatgatctaccaggatgaagtgaagctgccggccaaactgagcatcagcaaatcgctgaaagagtcggaggcgctgccagagaaggagggcgaggagctgggcgagggcgagcggcccgaggaggacgcagcggcgctggagctttcgtcggacgaagcggtggaggttgaggaggttattgaggagtcccgcgcaaagcgtatcaagcgcagcggcctgcggcgcgtggacgacttcaagaaggccttctccaaggagaagatggagaagaccaaggtgcgtacccgcgagaacctggagaagacgcgcctcaagaccaaggaaaacctggagaagacgcggcacaccctggagaagcgcatgaacaagctgggcacgcgcctggtgcccgccgagcggcgcgagaaactgaagacgtcgcgggacaagttgcgcaaatccttcacgcccgaccacgtggtgtacgcgcgctccaagaccgcggtctacaaggtgccacccttcaccttccacgtcaagaagatccgcgagggccaggtggaagtgctcaaggccaccgagatggtggaggtgggcgccgacgacgacgagggcggcgcggagcgcggggaggccggcgacctgcggcgcgggagcagccccgacgtgcacgcgctgctggagatcaccgaggagtcggacgccgtgctggtggacaagagcgacagcgactgagccgcccccgctgccacccaccccattcctcgctccttccgaacttcctctttcgcattctctctcggctcgagctggctgagatttttctaaattgaaaacacgcccccctccccacacctccaggaactccactcccagtcttagagctgttaggacccgatggggaggcagcccccgcagtggacagcccccgcttggacacagtccgagtggaatgggaagggaatggtcaatccctgtcctggttgtccaagtcgggatctcagaggaaattgcagtgattccacggttaggcccccctgggggggctgccttcccctcagcctctccccacaccacccacccagctgctgtcattccgctcactgagctcttcttcattctcaccctgatccctgggggactcaaagccaaaactgcccaaagaggaaagattgaatcctaaaggggatccttgcccccatgggaggccccctactagaaggacgtgaaagcagcttttgggggaaactgaggcagtggggaagacagagcagaatgagccctcaccctggctgggggtccagcacaggctgtatctgcagagggtcccagaggaacgctggagccaagagaagccctgggaaggaggggtggggaacgacatgcatgtgagggatggcacactgatgtgtttatgcacctgtacacaggagcgcatggccatggctttggaaaggagaatggaaaaatagaagaaggtcggccgggcttggtggcttatgcc

SEQ ID NO: 36 - DNA, 5128 bp, Homo sapiens
actctggagtgggagtgggagcgagcgcttctgcgactccagttgtgagagccgcaagggcatgggaattgacgccactcaccgacccccagtctcaatctcaacgctgtgaggaaacctcgactttgccaggtccccaagggcagcggggctcggcgagcgaggcacccttctccgtccccatcccaatccaagcgctcctggcactgacgacgccaagagactcgagtgggagttaaagcttccagtgagggcagcaggtgtccaggccgggcctgcgggttcctgttgacgtcttgccctaggcaaaggtcccagttccttctcggagccggctgtcccgcgccactggaaaccgcacctccccgcagcatgggcaccagcctcagcccgaacgacccttggccgctaaacccgctgtccatccagcagaccacgctcctgctactcctgtcggtgctggccactgtgcatgtgggccagcggctgctgaggcaacggaggcggcagctccggtccgcgcccccgggcccgtttgcgtggccactgatcggaaacgcggcggcggtgggccaggcggctcacctctcgttcgctcgcctggcgcggcgctacggcgacgttttccagatccgcctgggcagctgccccatagtggtgctgaatggcgagcgcgccatccaccaggccctggtgcagcagggctcggccttcgccgaccggccggccttcgcctccttccgtgtggtgtccggcggccgcagcatggctttcggccactactcggagcactggaaggtgcagcggcgcgcagcccacagcatgatgcgcaacttcttcacgcgccagccgcgcagccgccaagtcctcgagggccacgtgctgagcgaggcgcgcgagctggtggcgctgctggtgcgcggcagcgcggacggcgccttcctcgacccgaggccgctgaccgtcgtggccgtggccaacgtcatgagtgccgtgtgtttcggctgccgctacagccacgacgaccccgagttccgtgagctgctcagccacaacgaagagttcgggcgcacggtgggcgcgggcagcctggtggacgtgatgccctggctgcagtacttccccaacccggtgcgcaccgttttccgcgaattcgagcagctcaaccgcaacttcagcaacttcatcctggacaagttcttgaggcactgcgaaagccttcggcccggggccgccccccgcgacatgatggacgcctttatcctctctgcggaaaagaaggcggccggggactcgcacggtggtggcgcgcggctggatttggagaacgtaccggccactatcactgacatcttcggcgccagccaggacaccctgtccaccgcgctgcagtggctgctcctcctcttcaccaggtatcctgatgtgcagactcgagtgcaggcagaattggatcaggtcgtggggagggaccgtctgccttgtatgggtgaccagcccaacctgccctatgtcctggccttcctttatgaagccatgcgcttctccagctttgtgcctgtcactattcctcatgccaccactgccaacacctctgtcttgggctaccacattcccaaggacactgtggtttttgtcaaccagtggtctgtgaatcatgacccagtgaagtggcctaacccggagaactttgatccagctcgattcttggacaaggatggcctcatcaacaaggacctgaccagcagagtgatgattttttcagtgggcaaaaggcggtgcattggcgaagaactttctaagatgcagctttttctcttcatctccatcctggctcaccagtgcgatttcagggccaacccaaatgagcctgcgaaaatgaatttcagttatggtctaaccattaaacccaagtcatttaaagtcaatgtcactctcagagagtccatggagctccttgatagtgctgtccaaaatttacaagccaaggaaacttgccaataagaagcaagaggcaagctgaaattttagaaatattcacatcttcggagatgaggagtaaaattcagtttttttccagttcctcttttgtgctgcttctcaattagcgtttaaggtgagcataaatcaactgtccatcaggtgaggtgtgctccatacccagcggttcttcatgagtagtgggctatgcaggagcttctgggagatttttttgagtcaaagacttaaagggcccaatgaattattatatacatactgcatcttggttatttctgaaggtagcattctttggagttaaaatgcacatatagacacatacacccaaacacttacaccaaactactgaatgaagaagtattttggtaaccaggccatttttggtgggaatccaagattggtctcccatatgcagaaatagacaaaaagtatattaaacaaagtttcagagtatattgttgaagagacagagacaagtaatttcagtgtaaagtgtgtgattgaaggtgataagggaaaagataaagaccagaaattcccttttcaccttttcaggaaaataacttagactctagtatttatgggtggatttatccttttgccttctggtatacttccttacttttaaggataaatcataaagtcagttgctcaaaaagaaatcaatagttgaattagtgagtatagtggggttccatgagttatcatgaattttaaagtatgcattattaaattgtaaaactccaaggtgatgttgtacctcttttgcttgccaaagtacagaatttgaattatcagcaaagaaaaaaaaaaaagccagccaagctttaaattatgtgaccataatgtactgatttcagtaagtctcataggttaaaaaaaaaagtcaccaaatagtgtgaaatatattacttaactgtccgtaagcagtatattagtattatcttgttcaggaaaaggttgaataatatatgccttgtgtaatattgaaaattgaaaagtacaactaacgcaaccaagtgtgctaaaaatgagcttgattaaatcaaccacctatttttgacatggaaatgaagcagggtttcttttcttcactcaaattttggcgaatctcaaaattagatcctaagatgtgttcttatttttataacatctttattgaaattctatttataatacagaatcttgttttgaaaataacctaattaatatattaaaattccaaattcatggcatgcttaaattttaactaaattttaaagccattctgattattgagttccagttgaagttagtggaaatctgaacattctcctgtggaaggcagagaaatctaagctgtgtctgcccaatgaataatggaaaatgccatgaattacctggatgttctttttacgaggtgacaagagttggggacagaactcccattacaactgaccaagtttctcttctagatgattttttgaaagttaacattaatgcctgctttttggaaagtcagaatcagaagatagtcttggaagctgtttggaaaagacagtggagatgaggtcagttgtgttttttaagatggcaattactttggtagctgggaaagcataaagctcaaatgaaatgtatgcattcacatttagaaaagtgaattgaagtttcaagttttaaagttcattgcaattaaacttccaaagaaagttctacagtgtcctaagtgctaagtgcttattacattttattaagctttttggaatctttgtaccaaaattttaaaaaagggagtttttgatagttgtgtgtatgtgtgtgtggggtggggggatggtaagagaaaagagagaaacactgaaaagaaggaaagatggttaaacattttcccactcattctgaattaattaatttggagcacaaaattcaaagcatggacatttagaagaaagatgtttggcgtagcagagttaaatctcaaataggctattaaaaaagtctacaacatagcagatctgttttgtggtttggaatattaaaaaacttcatgtaattttattttaaaatttcatagctgtacttcttgaatataaaaaatcatgccagtatttttaaaggcattagagtcaactacacaaagcaggcttgcccagtacatttaaattttttggcacttgccattccaaaatattatgccccaccaaggctgagacagtgaatttgggctgctgtagcctatttttttagattgagaaatgtgtagctgcaaaaataatcatgaaccaatctggatgcctcattatgtcaaccaggtccagatgtgctataatctgtttttacgtatgtaggcccagtcgtcatcagatgcttgcggcaaaagaaagctgtgtttatatggaagaaagtaaggtgcttggagtttacctggcttatttaatatgcttataacctagttaaagaaaggaaaagaaaacaaaaaacgaatgaaaataactgaatttggaggctggagtaatcagattactgctttaatcagaaaccctcattgtgtttctaccggagagagaatgtatttgctgacaaccattaaagtcagaagttttactccaggttattgcaataaagtataatgtttattaaatgcttcatttgtatgtcaaagctttgactctataagcaaattgcttttttccaaaacaaaaagatgtctcaggtttgttttgtgaattttctaaaagctttcatgtcccagaacttagcctttacctgtgaagtgttactacagccttaatattttcctagtagatctatattagatcaaatagttgcatagcagtatatgttaatttgtgtgtttttagctgtgacacaactgtgtgattaaaaggtatactttagtagacatttataactcaaggataccttcttatttaatcttttcttatttttgtactttatcatgaatgcttttagtgtgtgcataatagctacagtgcatagttgtagacaaagtacattctggggaaacaacatttatatgtagcctttactgtttgatataccaaattaaaaaaaaattgtatctcattacttatactgggacaccattaccaaaataataaaaatcactttcataatcttgaaaaaa

SEQ ID NO: 37 - DNA, 581 bp, Homo sapiens
ccttcatgatattgctccaaagtggattgactaacactttcccctcttgacccaatatcatgaaggtcaattataattccatatacctttctttgatgccacagtcagagatagaatacagtttgggtggccatggatgtgccccaatacagtacacattttttggttaaatttgttttcagatcatttcatggaatctttgaagtatctttgactctaactttgacttggtggtggaccttccttggtttttataacacctaagagatatcctttagaattacatgtattttagcataaggaaattgaaaaagtaaaacatactggtttttttcaacaagaccatatgtaaattaaatagtgaaatgtgtatgagtttcagtagaactgtaccatcaacaatgtttccataaatatgcagagttctttcttttgtattgttatttacaatattgttaaattgaatgcatttgcaatttctaggattctaaagaattgagtacagaaagtagcaattttattatttgatgataatatgagaatattgtgccaatactgttttgataaataaatagattttt

SEQ ID NO: 38 - DNA, 1796 bp, Homo sapiens
ggtcagctgagttcgccggcccagggcaggcggggcccgagcctagcggtaacccccgggcagggcggggccgctcgcagactccatatgagattcacctcgcaggtggttccctcattcgagtgctccggcgcacagacccgcgccccgccgtctgcgagcctcccgagagccgtcccttcgtccggccctggagcattgcgtttgtcgccggtgtcgcagtgcgaggatggcgccgcgggtgtagcggctctctgcgcaggccgagtgggcccagagaagcgaggaactccgcagctcgtcgacacgtctcgtctcctgtcccaattcagggcttggtgaggtgactcgcggtcgcgggtgactcgccggcaggacactgcctggaacgcctggagcgcctcccactgcagacgtctgtccgcctccagccgctctcctctgacgggtcctgcctcagttggcggaatggcggccacgggagccaatgcagagaaagctgaaagtcacaatgattgccccgtcagacttttaaatccaaacatagcaaaaatgaaagaagatattctctatcatttcaatctcaccactagcagacacaatttcccagccttgtttggagatgtgaagtttgtgtgtgttggtggaagcccctcccggatgaaagccttcatcaggtgcgttggtgcagagctgggccttgactgcccaggtagagactatcccaacatctgtgcgggaactgaccgctatgccatgtataaagtaggaccggtgctgtctgtcagtcatggtatgggcattccttctatctcaatcatgttgcatgagctcataaagctgctgtactatgcccggtgctccaacgtcactatcatccgcattggcacttctggtgggataggtctggagcccggcactgtggtcataacagagcaggcagtggatacctgcttcaaggcagagtttgagcagattgtcctggggaagcgggtcatccggaaaacggaccttaacaagaagctggtgcaggagctgttgctgtgttctgcagagctgagcgagttcaccacagtggtggggaacaccatgtgcaccttggacttctatgaagggcaaggccgtctggatggggctctctgctcctacacggagaaggacaagcaggcgtatctggaggcagcctatgcagccggcgtccgcaatatcgagatggagtcctcggtgtttgccgccatgtgcagcgcctgcggcctccaagcggccgtggtgtgtgtcaccctcctgaaccgcctggaaggggaccagatcagcagccctcgcaatgtgctcagcgagtaccagcagaggccgcagcggctggtgagctacttcatcaagaagaaactgagcaaggcctgagcgctgccctgcacctccgcagacctgctgtgatgacttgccattaaaagcattgtccaaaatcccctgttgtgtggactttgagcacactttacacaagaatctagaaaatcagatcgcgattaagagacagagaatcttggattaaccgcatgggagatgttcttccttttgaagtttcattggagcattttcaatgatgttagcctgatttggggtttcttcaagaacattctaccaaatttttgtactatttctagggaaatttttcagactttaaaattctaatggtagtcagatttcatgtcactaaacaagaaatctgacaatagtgccaggaaactaatttcctgatacattaaaaaaattccatgcaaaaaaaaaaaaaaaaaaaa

SEQ ID NO: 39 - DNA, 453 bp, Homo sapiens
ttttgaattctggaaaactcttaacataaagatttggtctaagggtcagaactttgttctagcctgcaagggatccctaagttctgtcattctaccactaaagccaagcttcttggttctcctcagaagcctacatcatagacagaaacggaaaggcaaaaatgaaaaagaggaatatgaaaaagtgggagagaaaaagaaaaacatgaaaaatttctctataattctattaagtgagaatatgtcagctgggcacagtggctcatgcctgtagtcccagtactttgggaggccaaggcaggtggatcacttgagctcaggagtttgagaccagcctggccaacatggtgaaatcccatctctactaaacattcaaaaattagctgggcatggtggtgcacacctgtagtcccagctactcggaagcctgaggcatgagaatcgtttgaacct

SEQ ID NO: 40 - DNA, 4407 bp, Homo sapiens
tttcgactcgcgctccggctgctgtcacttggctctctggctggagcttgaggacgcaaggagggtttgtcactggcagactcgagactgtaggcactgccatggcccctgtgctcagtaaggactcggcggacatcgagagtatcctggctttaaatcctcgaacacaaactcatgcaactctgtgttccacttcggccaagaaattagacaagaaacattggaaaagaaatcctgataagaactgctttaattgtgagaagctggagaataattttgatgacatcaagcacacgactcttggtgagcgaggagctctccgagaagcaatgagatgcctgaaatgtgcagatgccccgtgtcagaagagctgtccaactaatcttgatattaaatcattcatcacaagtattgcaaacaagaactattatggagctgctaagatgatattttctgacaacccacttggtctgacttgtggaatggtatgtccaacctctgatctatgtgtaggtggatgcaatttatatgccactgaagagggacccattaatattggtggattgcagcaatttgctactgaggtattcaaagcaatgagtatcccacagatcagaaatccttcgctgcctcccccagaaaaaatgtctgaagcctattctgcaaagattgctctttttggtgctgggcctgcaagtataagttgtgcttcctttttggctcgattggggtactctgacatcactatatttgaaaaacaagaatatgttggtggtttaagtacttctgaaattcctcagttccggctgccgtatgatgtagtgaattttgagattgagctaatgaaggaccttggtgtaaagataatttgcggtaaaagcctttcagtgaatgaaatgactcttagcactttgaaagaaaaaggctacaaagctgctttcattggaataggtttgccagaacccaataaagatgccatcttccaaggcctgacgcaggaccaggggttttatacatccaaagactttttgccacttgtagccaaaggcagtaaagcaggaatgtgcgcctgtcactctccattgccatcgatacggggagtcgtgattgtacttggagctggagacactgccttcgactgtgcaacatctgctctacgttgtggagctcgccgagtgttcatcgtcttcagaaaaggctttgttaatataagagctgtccctgaggagatggagcttgctaaggaagaaaagtgtgaatttctgccattcctgtccccacggaaggttatagtaaaaggtgggagaattgttgctatgcagtttgttcggacagagcaagatgaaactggaaaatggaatgaagatgaagatcagatggtccatctgaaagccgatgtggtcatcagtgcctttggttcagttctgagtgatcctaaagtaaaagaagccttgagccctataaaatttaacagatggggtctcccagaagtagatccagaaactatgcaaactagtgaagcatgggtatttgcaggtggtgatgtcgttggtttggctaacactacagtggaatcggtgaatgatggaaagcaagcttcttggtacattcacaaatacgtacagtcacaatatggagcttccgtttctgccaagcctgaactacccctcttttacactcctattgatctggtggacattagtgtagaaatggccggattgaagtttataaatccttttggtcttgctagcgcaactccagccaccagcacatcaatgattcgaagagcttttgaagctggatggggttttgccctcaccaaaactttctctcttgataaggacattgtgacaaatgtttcccccagaatcatccggggaaccacctctggccccatgtatggccctggacaaagctcctttctgaatattgagctcatcagtgagaaaacggctgcatattggtgtcaaagtgtcactgaactaaaggctgacttcccagacaacattgtgattgctagcattatgtgcagttacaataaaaatgactggacggaacttgccaagaagtctgaggattctggagcagatgccctggagttaaatttatcatgtccacatggcatgggagaaagaggaatgggcctggcctgtgggcaggatccagagctggtgcggaacatctgccgctgggttaggcaagctgttcagattcctttttttgccaagctgaccccaaatgtcactgatattgtgagcatcgcaagagctgcaaaggaaggtggtgccaatggcgttacagccaccaacactgtctcaggtctgatgggattaaaatctgatggcacaccttggccagcagtggggattgcaaagcgaactacatatggaggagtgtctgggacagcaatcagacctattgctttgagagctgtgacctccattgctcgtgctctgcctggatttcccattttggctactggtggaattgactctgctgaaagtggtcttcagtttctccatagtggtgcttccgtcctccaggtatgcagtgccattcagaatcaggatttcactgtgatcgaagactactgcactggcctcaaagccctgctttatctgaaaagcattgaagaactacaagactgggatggacagagtccagctactgtgagtcaccagaaagggaaaccagttccacgtatagctgaactcatggacaagaaactgccaagttttggaccttatctggaacagcgcaagaaaatcatagcagaaaacaagattagactgaaagaacaaaatgtagctttttcaccacttaagagaagctgttttatccccaaaaggcctattcctaccatcaaggatgtaataggaaaagcactgcagtaccttggaacatttggtgaattgagcaacgtagagcaagttgtggctatgattgatgaagaaatgtgtatcaactgtggtaaatgctacatgacctgtaatgattctggctaccaggctatacagtttgatccagaaacccacctgcccaccataaccgacacttgtacaggctgtactctgtgtctcagtgtttgccctattgtcgactgcatcaaaatggtttccaggacaacaccttatgaaccaaagagaggcgtacccttatctgtgaatccggtgtgttaaggtgatttgtgaaacagttgctgtgaactttcatgtcacctacatatgctgatctcttaaaatcatgatccttgtgttcagctctttccaaattaaaacaaatatacattttctaaataaaaatatgtaatttcaaaatacatttgtaagtgtaaaaaatgtctcatgtcaatgaccattcaattagtggcataaaatagaataattcttttctgaggatagtagttaaataactgtgtggcagttaattggatgttcactgccagttgtcttatgtgaaaaattaactttttgtgtggcaattagtgtgacagtttccaaattgccctatgctgtgctccatatttgatttctaattgtaagtgaaattaagcattttgaaacaaagtactctttaacatacaagaaaatgtatccaaggaaacattttatcaataaaaattacctttaattttaatgctgtttctaagaaaatgtagttagctccataaagtacaaatgaagaaagtcaaaaattatttgctatggcaggataagaaagcctaaaattgagtttgtggactttattaagtaaaatccccttcgctgaaattgcttatttttggtgttggatagaggatagggagaatatttactaactaaataccattcactactcatgcgtgagatgggtgtacaaactcatcctcttttaatggcatttctctttaaactatgttcctaaccaaatgagatgataggatagatcctggttaccactcttttactgtgcacatatgggccccggaattctttaatagtcaccttcatgattatagcaactaatgtttgaacaaagctcaaagtatgcaatgcttcattattcaagaatgaaaaatataatgttgataatatatattaagtgtgccaaatcagtttgactactctctgttttagtgtttatgtttaaaagaaatatattttttgttattattagataatatttttgtatttctctattttcataatcagtaaatagtgtcatataaactcatttatctcctcttcatggcatcttcaatatgaatctataagtagtaaatcagaaagtaacaatctatggcttatttctatgacaaattcaagagctagaaaaataaaatgtttcattatgcacttttagaaatgcatatttgccacaaaacctgtattactgaataatatcaaataaaatatcataaagcatttt

SEQ ID NO: 41 - DNA, 4254 bp, Homo sapiens
ggggactacccagagggctgccgccgcctctccaagttcttgtggcccccgcggtgcggagtatggggcgctgatggccatggagggctaccggcgcttcctggcgctgctggggtcggcactgctcgtcggcttcctgtcggtgatcttcgccctcgtctgggtcctccactaccgagaggggcttggctgggatgggagcgcactagagtttaactggcacccagtgctcatggtcaccggcttcgtcttcatccagggcatcgccatcatcgtctacagactgccgtggacctggaaatgcagcaagctcctgatgaaatccatccatgcagggttaaatgcagttgctgccattcttgcaattatctctgtggtggccgtgtttgagaaccacaatgttaacaatatagccaatatgtacagtctgcacagctgggttggactgatagctgtcatatgctatttgttacagcttctttcaggtttttcagtctttctgcttccatgggctccgctttctctccgagcatttctcatgcccatacatgtttattctggaattgtcatctttggaacagtgattgcaacagcacttatgggattgacagagaaactgattttttccctgagagatcctgcatacagtacattcccgccagaaggtgttttcgtaaatacgcttggccttctgatcctggtgttcggggccctcattttttggatagtcaccagaccgcaatggaaacgtcctaaggagccaaattctaccattcttcatccaaatggaggcactgaacagggagcaagaggttccatgccagcctactctggcaacaacatggacaaatcagattcagagttaaacaatgaagtagcagcaaggaaaagaaacttagctctggatgaggctgggcagagatctaccatgtaaaatgttgtagagatagagccatataacgtcacgtttcaaaactagctctacagttttgcttctcctattagccatatgataattgggctatgtagtatcaatatttactttaatcacaaaggatggtttcttgaaataatttgtattgattgaggcctatgaactgacctgaattggaaaggatgtgattaatataaataatagcagatataaattgtggttatgttacctttatcttgttgaggaccacaacattagcacggtgccttgtgcagaatagatactcaatatgtgaatatgtgtctactagtagttaattggataaactggcagcatccctggcctgttgtcatgcagtcatttcctgttaattctgggagacaatgatttcacaactagagggaagcagtcctaaaagtttaaaatccgataaggaatatctgggacagggtttagatcatgactctacacagataccatgatgagagtatattaaagaaatttaggaaagcacctggttcctttctccccatgcctgccttctgctccctccccagctggtttgggctcaaattgtccctggagactagggtttatgttagggtattgatagattagagcaggtggttgaagagatcttctctggtcagacttggaagaatttccaaaagtgaagttagccccaagacttccctagggttgatgtactttatgatccagatgctaaacttcttagaatgaaaatatgcttcaacacttaagtagcatacactgccctacaaacctcagagagcacttttccccaagttcttgtttttatttttgaaagtactcacacagcacttactatgctccaaacactcctctaagcactttacacatattagctcattcagtccccagacagacgggatgaagtaggtattgttactgttcccattttacaggtgagagatttgaagcctggggaggctagtaactcaccccaaggtcacacggctcatacatggtgggactgagactcagatgcaggcagtctggcacctcagtctggattctaaccatttcactaagctatttttgtcttgtactactttgacccacccctgaataaacctcaattgctggagtggggtgtagttattaaagggatgctttttaccttttgctgtctgctgtggcagattccccagataaccaaggaaaaggggccacccatacctggaaataggccatagggcccctactactgccaacaagccatggcctaccttgacacttgtttgatcttaaaattgtgtcttggtaacaaaagatttggacaggcatatctgtagctttcaagttaattaattgcaatatttttttcttcaggattttagctgctgaacaactttcagtttggagctaaaagagacctgtctcatggtctgcccttccctggggcaatagctagggtctttcctgatttttatggaattttaggggatattttgagctttgggttctcagtagtgaattgagacttggaggtgacttttcatgtttggagtatcatctctgtctgggctctgggctgacaaattaaaacctagagtagtgcttatgctgaaatgatacttttcattttttggttgatttttttgccttcccttcaattttaaactgaagcattttaatgtgggtagaaactctacaccaaatacactaaacattttggtgcttagtggatttctttttaggtaactggtacttacttccaaagactgaatacaagccacactccatcatatcccttaaacttcatgaaaaaccattcaagatccccttgctgcaacactgttctcttcttctctactaaattctatttccaaaattggtaatagagccagaaggatccccagtacccagccctctgcctggcacaaagtggtagcacaattaaattcagtatgggtggagcatggtacagtcttggtgccatagaaggagtagttgcatagtcacacatcatttgataagttggatgttccattacatagaggaacacaaaattccagggtttttggaggaagggattagatagcgactaagccgccagaattgaggtggccattcctttttgtataggctaagaaacaggttatcagtgaaaagttaattatggctttggcactagaatagcactgttgcaaagtatttaagcaccccccatctcagccctttattttatctttcatgtgggctaatgtgaggataatcttacagatattataggaatttcttttctatctttatgaaaacaacgtatataaaatatatctagaaaacctttgtttgagactcttatttaatgggcttttgattctaatgataattgtacctttatctttcaaaagctgatatttcctacctaagcatctcccgagaaaaatatctcattaaaaagcccataaataataggggagaagaaagccttaggtatcaattccaaaacagtgattgaaatttcccaaaataattatggcttctgtcatctccagagataatctggcttggtttaccccataatctaatttcagaaaagaaagctttattttaacactcatctgaatcaacattaaagccttttctctcaaagcgtttattgagaaactcaaatgaatatactttttgaattactgtcatcaaaagtgtacggcttcctgtgctgcttgtgtcaaatggaacctgccctctaaagcactttctttcctttacttgcgtggtttcatgtaagctgtgctgtttagaaacaacatctcagactttacaaagaaatgacaaagaaggcaattgcactttttaagggatatcgacaagcagtttctgttttctaaaggacaaaatacagagtgtgtgtcatttttaattagattctttcccctgctgagttggaaattccagtgcagcactgattgaccacagttgccaatctaaaagcacaaagacagaagtaaagctttatgctaattttatttcaatatgatagaaaatttatcttggtatgtccttttttagataactccagcaggaaactgtaactgctatgtctttaggaaaacgtagaagaaagaacattattattctttaattcctacaaggtacttgaaaaccttaagtgaaaaagatttctatctttttatcttggcgcatttatggaaaaaatattaactgtcctgaatattttataattttgtaggaaaaatatgcatctattttttcttgacttcttttatatagtaataaaagttattttggaaaaaaaaaaaaaaaaaaaa

SEQ ID NO: 42 - DNA, 3401 bp, Homo sapiens
aaaatttgaagacaagatgggcacctactctacaattctgataaaaacagaggtcatcgaatgtgggaactactgtggagtacgcatcattcactctttgattgcagagttctcactggaagaattgaagaaaagctatcacctgaataaaagtcaaattatgttggatatgctaactgagaatttgttcttcgatactggtatgggaaaaagtaaatttttgcaagatatgcacacactcctactcacaagacaccgcgatgaacatgaaggtgaaacaggaaattggttttccccatttattgaagcattacataaagatgaaggaaatgaagcagttgaagctgtattgcttgaaagtatccatcggttcaacccaaatgcattcatttgccaagcgttggcaagacatttctacattaaaaagaaggactttggcaatgctctaaactgggcaaaacaagcaaaaatcatagaacctgacaattcttatatctcagatacactgggtcaagtctacaaaagtaaaataagatggtggatagaggaaaacggaggaaacgggaacatttcagttgatgatctaattgctcttttggatttagcagaacatgcctcaagtgcattcaaagaatctcaacagcaaagtgaagatagagagtatgaagtgaaggaaagattgtatccgaagtcaaaaaggcggtatgatacttacaatatagctggttatcaaggagagatagaagttgggctttacacaatccaaattctccagctcattcctttttttgataataaaaatgagctatctaaaagatatatggtcaattttgtatcaggaagtagtgatattccaggggatccaaacaatgaatataaattagccctcaaaaactatattccttatttaactaaattgaaattttctttgaaaaagtcctttgatttttttgatgaatactttgtcctgctaaaacccaggaacaatattaagcaaaatgaagaggccaaaactcggagaaaggtggctggatattttaagaaatatgtagatatattttgtctcttagaagaatcacaaaacaacacaggtcttggatcaaagttcagtgagccacttcaagtagagagatgcaggagaaacctagtagctttaaaagcagacaagttttctgggctcttggaatatcttatcaaaagtcaagaggatgctataagcactatgaaatgtatagtgaacgaatatacttttctcttagaacaatgcactgtcaaaatccagtcaaaagaaaagctaaatttcatcttggccaacattattctctcctgtatccaacctacctccagattagtaaagccagttgaaaaactaaaagatcagcttcgagaagtcttgcaaccaataggactgacttatcagttttcagaaccgtattttctagcttccctcttattctggccagaaaatcaacaactagatcaacattctgaacaaatgaaagagtatgctcaagcactaaaaaattctttcaaggggcaatataaacatatgcatcgtacaaagcaaccaattgcatatttctttcttggaaaaggtaaaagactggaaagacttgttcacaaaggaaaaattgaccagtgctttaagaagacaccagatattaattccttgtggcagagtggagatgtgtggaaggaggaaaaagtccaagaacttttgcttcgtttacaaggtcgagctgaaaacaattgtttatatatagaatatggaatcaatgaaaaaatcacaatacccatcactcccgcttttttaggtcaacttagaagtggcagaagcatagagaaggtgtctttttacctgggatttcccattggaggcccacttgcttatgacattgaaattgtttaagagcctgatattcttcctccaagaatttgatctcagtacccatttaatttttttggactcaagatctatgctttaaaccggcaaggttatagatacagcctctagctcttcagatctgtacatgcagtatttaatttcctcttaaacatgttatgagttctacaaggacaatagtgaaaaaggaaggagtgagatatatgaaaagtagcaaatatgttccttggtttggttaacatcattgatgacaaaataataaggagctatgactggagtcaggagaagttagtgtaataagctggctacacagaaccccactacttaccaggcatggattgaagaagattgtctactcaaatggcatttagacattagaatgtctgggaaaatatttctcaaagacagcaaaaacctctcaaactgaggagcaacatttattcttactaagcagatcatcaatgtatcatgtgcttggcactcaaggatcttccaaaacagaggaccaaccagtcttctgaaggtcatgcccacagaagtcatcggaccttaccaaagtaggttggagaattagattgccttttcatgcagtgagattcagttaagcaaaaatgaaatttgtctctatagctaattagcttatcaactcccctccaaacaaacaattaaaaaaaaaacatacagacactcaaattccacaagctaatgaacaaaagggactcttgtgagaagactaatgagtccctcatccagaagatgccaatgtactggcagattaacatacaacctatgttttgaacaaaaacaaccagcgatacgtaatcaaaatgtaattttcccctaataaaattatggatatgggcagtcatcaatggctgccaaaaccattaagtggaaagctgattaaaaaacaaaaatttctaatggatttatcaaactgtcccaaatcctgataaatattaacatcacagaggaagaccagacattatgggcctggaagtactataggagtgcacacatcacccgtgacatggtcttgccaaataattaaacctgaatttgatcaggtctctggatcttatttgcaattcaaaagaaattttaaaaaaatcctactaacaccaccacaaatatgcaatcagcaatatccagaaaggggaaattcacaggacaaaaacctggttttcttttttggtttcttcaaccaaaaaagaaagaaattgcaaaggaccaaaaaaatgttggggaatctatacattataagggacttaacaactaaagggcaacatatagactttagatcctaatttgagcaaaatctaaaatcaattattaggcaatcagaaaaatttgaacacagactagatatttgaggatattaaggtactatattattgaagattccatggttatgttttttaaagagttcatgccttttagagatacatactaaagtatttgtaaataaatgacatgatctagaaaaaaaaaaaaaaaa

SEQ ID NO: 43 - DNA, 5411 bp, Homo sapiens
ggccaagccggggccccgaagccagagccggagccgggcgggccgcggggtcatggctgggccgcggggcgcgctgctggcctggtgccgccgccagtgcgagggctaccgcggcgtggagatccgcgacctgagcagctccttccgggacggcctggccttctgcgccatcctgcaccggcaccggcccgacctgctagattttgattcgctttccaaggacaatgtcttcgagaataaccgtttggcctttgaagtggctgagaaggagctggggatccccgctctcctggaccccaatgacatggtctccatgagcgtccctgactgcctcagcatcatgacctatgtgtcccagtattacaaccacttctgcagtcctggccaagctggtgtctcgccacccagaaagggccttgcaccctgttccccgccgtctgtagcacccactccagtggaaccagaagatgtggctcagggcgaggagctctcctcaggcagcctgtcagagcagggcaccggccagacccccagcagcacgtgcgcagcctgccagcagcatgtgcacttggtgcagcgctacctggctgacggcaggctgtaccatcgccactgcttccggtgtcggcggtgctccagcaccctgctccctggggcttatgagaatgggcctgaggagggcacctttgtgtgtgcagaacactgtgccaggctgggcccggggacacggtcggggaccaggcctgggcccttctcacagccaaagcagcagcaccagcagcaactcgcagaagatgccaaggatgttccaggaggcggccccagctccagtgctcctgcaggggctgaggccgatggacccaaggccagccctgaggcccggccgcagatccctaccaagccccgggttcctggcaaactacaggagctggccagcccccctgcgggccgccccacccctgcccccaggaaggcctctgagagcaccaccccagcaccccccacgccccggccccgctccagtctgcagcaggagaacctggtggagcaggctggcagcagcagcctggtgaacgggagactgcacgaactgcctgtccccaagccgagggggacaccgaagccgtccgaggggacaccagcccccaggaaggaccccccatggatcacgctggtgcaggcagaaccaaagaagaagccagccccacttcccccaagcagcagcccggggccaccaagccaggacagcaggcaggtggagaatggaggcaccgaggaggtggcccagccgagcccaacggccagcctggagtccaaaccctataacccctttgaggaggaggaggaggacaaggaggaagaggctccagctgcacccagcctggccaccagccctgccctgggccacccggagtccacacccaagtccctgcacccctggtacggcatcacccctaccagcagccccaagacaaagaagcgccctgccccgcgcgcacccagcgcgtccccactggctctccacgcctcccgcctctcgcactcggagccgccctcggccacaccatcgccagcgctcagcgtggagagcctgtcgtctgagagcgccagccagactgcaggtgcagagcttctggagccgccagctgtgcccaagagctcctcagagcctgctgtccatgcccctggtacccctggaaaccctgtcagcctctctaccaactcctccctggcctcctctggggaactagtggagcctagagtggaacaaatgcctcaagccagccctggccttgcccccaggaccaggggcagctcaggtccccagccagccaagccctgcagtggcgccaccccaacgcctctcttgttggttggagacaggagcccggtgccttcccctggaagctcgtccccacagctgcaggtaaagtcctcctgcaaggagaatccttttaaccggaagccatcacctgcagcgtccccagccacaaagaaggccaccaagggatccaagccagtgaggccacctgcccctggacacggctttccactcatcaaacgcaaggtccaggctgaccagtacatccctgaggaggacatccatggagagatggataccattgagcgccggctggatgccctggagcaccgtggggtgctgctggaggagaagctgcgtggcggcctgaatgagggccgtgaggatgacatgctggtggactggttcaagctcatccacgagaagcacctactggtgcggcgagagtccgagctcatctatgtcttcaagcagcagaacctggagcagcgccaggctgatgtcgagtatgagctccggtgcctcctcaataagccagaaaaggactggacggaggaggaccgggcccgggagaaggtgctgatgcaggagcttgtgaccctcattgagcagcgcaacgctatcatcaactgcctggatgaggaccggcagagggaggaagaggaagacaagatgttggaagccatgatcaagaagaaagagttccagagggaggctgaacctgagggcaagaagaaggggaagttcaagaccatgaagatgttgaaactgctaggaaacaaacgtgatgccaagagcaagtcccccagagacaagagctaacagcacgagaagccagttggggactgccccctcctggagcagctcctgggctgtgctctgtttgaagggggcgccctgctcccctcagatcagtcaggaggaagatgactaaggggagggatcctctgggtgatggcctcttcctcctcagggacctctgactgctctgggccaaagaatctcttgtttcttctccgagccccaggcagcggtgattcagccctgcccaacctgattctgatgactgcggatgctgtgacggacccaaggggcaaatagggtcccagggtccagggaggggcgcctgctgagcacttccgcccctcaccctgcccagcccctgccatgagctctgggctgggtctccgcctccagggttctgctcttccaggcaggccagcaagtggcgctgggccacactggcttcttcctgccccatccctggctctgagtctctgtcttcctgtcctgtgcaggcgcccttggatctcagtttccctcactcaggaactctgtttctgaagtcttcagttaagtttgagtttatgactgagtggcctgtactgtcagacgtgaatgggcctgacgggcaaatccatccctctctccctcacagttccaggagcggcttccctcgtctccccttactccacagggagcctcccttgccaggaccagggctgcgacggccatgctggggcaggtgagtgctctgttagctgctcccagtgctgtccccaggctgcagttctggtccctggttgtcaggtaggaagggtgcacttgaagcaggtgctcatctcggttccttaacgtttatagtctgacccctcacttaggctttcctctgccaccccggtccagggaagaggctcgctcccgcccatggtcatcactggtctgtctgctctgttgtctgttctttccctgactccctcccaccgaaggcctgatggctactcacccctctgggatggctatgggagaggaggagtgatggggaccgccaccttttctgcaggaaatgtgcccagcagctcttggtcaaagcactgttgctataagctatctctgggatgcctctaggcccccttccctctacacacctctgggaaaagattacactgtattaactctcgaggagtttcctcaccaataaacagacaacctcaactgccagtgccctgcagcctcgggccacagcggcagccttgtttgccttcccacctgcctctgccacacctggtggctgaacatctctggtcgcccagaggccatgttggggccatcctccaagagggatctctgccctcaccgcctgccactgggcaggatccctttcctctgcagggagaggtggctcctcggccatgcagcccctggcaggctccttctaaacatgcctgttgacctggagctggcgccaccaactccagggcctttccagggccagacaggtaacacgcatgaacccgagtgacagctctgacgggctgtttcggtgtcaggagacaaagctggcaggggcaggggtgaactggaggcaagtcaagtcacctgtggcctgtggggctgaatgtgggcccggtgttgccagatcctttgtcataagaagctagaaatccagattttatgtgtgtgtaatttgtaaatgctgaaagctagcctgaattttttttttttttttttgagacagagtctcgctctgtcgcccaggctggagtgcagtggcgcgatctcagctcactgcaagctccgcctcctgggttcacgccatcctcctgcctcggcctcctgagcagctgggactacaggcgcatgctacgacgcctggctaattttttgtatttttagtagagacggggtttcaccgtgttaaccaggatggtctcgatctcctgaccttgtgatccacccaccttggcctcccaaagtgctgggattacaggcgtgagccaccacgcccggccactagcctgaatttcaatcaagggttggctgatactgtgtgtccagggtggactggatttgtcctggggggttctctggtttgctgcctcctgaccacatgatggggccttcgaggtcgaggacaactgttcccattagattgcaccctctgccctcaggttcttgagggtgtgtggacacagaggctttccatgggatgtccctgagccggcccttgattggggcctcaccatttacagggccgttttattctgcaaaccgaaacttgggtcatgtgacctgatgggattatgggactccctccaggtgcccgagacaaggttgatatttccaaaatattttggtgatttagtgggacaagcaaatgacagaataccggagaaggcagggatcgtgggtgtcaggagccagaggggagggggacagatgtgctgtgtacaggacaaggtgtcaggtgactccttcccagcagggcctcgcagatgcacaagcacggagctggtgggttttgcccaagaaaggtcacgcggcacatgcagggattggaactcccaggccagggctctaggtcgctcccaccttttcatgtttctttctgtggccatgggtatagtggaaagacataaagctaaagccaacttttaatcctgaatgcactgcttgccaggtaaatgcccttggttgtggtatcttgttgagacttagttttcacagagggataatgaaccgttgcagaggtttattgagatcattaacagagtggaattcagcacccgccacagcagccagccatggg

SEQ ID NO: 44 - DNA, 502 bp, Homo sapiens
tttttttttttttttaaatacttacagctttattaggagagggctgtggtcacctcagcagccagctcccttgtatacacagtatacacagcccagccagcacccaggtccttccatccttctgcagtacatggagtgcaaaagaaccaaacacaacggcggggagggagggtctaccaatgagtgtcagtgtctagtgcttccgggagccaactgccaggctagggacactcaagtccctcaaactgtcatcagctcctgccagaccccactccagcatgtcgagtgtttgggccagactcctccaatcagtgcacgcgatgggcagaggaggctagggaatcctgagcccaaagctgtattggtccatccccctcaagaagttgttggagctttcagaacgttcctcttcttgtgtagacatgagataccgctgtaactttactccatcaccagaaacctgtgccttgagtctagtctctgctcagccctcgagagcatg

SEQ ID NO: 45 - DNA, 1249 bp, Homo sapiens
ggcacgagccagggtttcctcttcaagtaggtctaaaacattttttttctcattgacttccttcctgttctaactgccagtactcagaagtcagagttgagagacagaggcaccccggacagagacgtgaagcactgaataaatagatcagaatgactgaaaaagccccagagccacatgtggaggaggatgacgatgatgagctggacagcaagctcaattataagcctccaccacagaagtccctgaaagagctgcaggaaatggacaaagatgatgagagtctaattaagtacaagaaaacgctgctgggagatggtcctgtggtgacagatccgaaagcccccaatgtcgttgtcacccggctcaccctggtttgtgagagtgccccgggaccaatcaccatggaccttactggagatctggaagccctcaaaaaggaaaccattgtgttaaaggaaggttctgaatatagagtcaaaattcacttcaaagtgaacagggatattgtgtcaggcctgaaatacgttcagcacacctacaggactggggtgaaagtggataaagcaacatttatggttggcagctatggacctcggcctgaggagtatgagttcctcactccagttgaggaggctcccaagggcatgctggcccgaggcacgtaccacaacaagtccttcttcaccgacgatgacaagcaagaccacctcagctgggagtggaacctgtcgattaagaaggagtggacagaatgaatgcatccaccccgttccccacccttgccacctggaagaattctctcaggcgtgttcagcaccctgtccctcctccctgtccacagctgggtccctcttcaacactgccacatttccttattgatcgatcttttcccaccctgtcactcaacgtggtccctagaacaagaggcttaaaaccgggctttcacccaacctgctccctctgatcctccatcagggccagatcttccacgtctccatctcagtacacaatcatttaatatttccctgtcttacccctattcaagcaactagaggccagaaaatgggcaaattatcactaacaggtctttgactcaggttccagtagttcattctaatgcctagattcttttgtggttgttgctggcccaatgagtccctagtcacatcccctgccagagggagttcttcttttgtgagagacactgtaaacgacacaagagaacaagaataaaacaataactgtg

SEQ ID NO: 46 - DNA, 13793 bp, Homo sapiens
gcccggagcgagcgagcgagagagcggcgcgggccgggccatggggtggcgggcgccgggcgcgctgctgctggcgctgctgctgcacgggcggctgctggcggtgacccatgggctgagggcatacgatggcttgtctctgcctgaggacatagagaccgtcacagcaagccaaatgcgctggacacattcgtacctttctgatgatgaggacatgctggctgacagcatctcaggagacgacctgggcagtggggacctgggcagcggggacttccagatggtttatttccgagccctggtgaatttcactcgctccatcgagtacagccctcagctggaggatgcaggctccagagagtttcgagaggtgtccgaggctgtggtagacacgctggagtcggagtacttgaaaattcccggagaccaggttgtcagtgtggtgttcatcaaggagctggatggctgggtttttgtggagctggatgtgggctcggaagggaatgcggatggggctcagattcaggagatgctgctcagggtcatctccagcggctctgtggcctcctacgtcacctctccccagggattccagttccgacgcctgggcacagtgccccagttcccaagagcctgcacggaggccgagtttgcctgccacagctacaatgagtgtgtggccctggagtatcgctgtgaccggcggcccgactgcagggacatgtctgatgagctcaattgtgaggagccagtcctgggtatcagccccacattctctctcctcgtggagacgacatctttaccgccccggccagagacaaccatcatgcgacagccaccagtcacccacgctcctcagcccctgcttcccggttccgtcaggcccctgccctgtgggccccaggaggccgcatgccgcaatgggcactgcatccccagagactacctctgcgacggacaggaggactgcgaggacggcagcgatgagctagactgtggccccccgccaccctgtgagcccaacgagttcccctgcgggaatggacattgtgccctcaagctgtggcgctgcgatggtgactttgactgtgaggaccgaactgatgaagccaactgccccaccaagcgtcctgaggaagtgtgcgggcccacacagttccgatgcgtctctaccaacatgtgcatcccagccagcttccactgtgacgaggagagcgactgtcctgaccggagcgacgagtttggctgcatgcccccccaggtggtgacacctccccgggagtccatccaggcttcccggggccagacagtgaccttcacctgcgtggccattggcgtccccgccccctttctcatcaattggaggctcaactggggccacatcccctctcagcccagggtgacagtgaccagcgagggtggccgtggcacactgatcatccgtgatgtgaaggagtcagaccagggtgcctacacctgtgaggccatgaacgcccggggcatggtgtttggcattcctgacggtgtccttgagctcgtcccacaacgagcaggcccctgccctgacggccacttctacctggagcacagcgccgcctgcctgccctgcttctgctttggcatcaccagcgtgtgccagagcacccgccgcttccgggaccagatcaggctgcgctttgaccaacccgatgacttcaagggtgtgaatgtgacaatgcctgcgcagcccggcacgccacccctctcctccacgcagctgcagatcgacccatccctgcacgagttccagctagtcgacctgtcccgccgcttcctcgtccacgactccttctgggctctgcctgaacagttcctgggcaacaaggtggactcctatggcggctccctgcgttacaacgtgcgctacgagttggcccgtggcatgctggagccagtgcagcggccggacgtggtcctcgtgggtgccgggtaccgcctcctctcccgaggccacacacccacccaacctggtgctctgaaccagcgccaggtccagttctctgaggagcactgggtccatgagtctggccggccggtgcagcgcgcggagctgctgcaggtgctgcagagcctggaggccgtgctcatccagaccgtgtacaacaccaagatggctagcgtgggacttagcgacatcgccatggataccaccgtcacccatgccaccagccatggccgtgcccacagtgtggaggagtgcagatgccccattggctattctggcttgtcctgcgagagctgtgatgcccacttcactcgggtgcctggtgggccctacctgggcacctgctctggttgcagttgcaatggccatgccagctcctgtgaccctgtgtatggccactgcctgaattgccagcacaacacggaggggccacagtgcaagaagtgcaaggctggcttctttggggacgccatgaaggccacggccacttcctgccggccctgcccttgcccatacatcgatgcctcccgcagattctcagacacttgcttcctggacacggatggccaagccacatgtgacgcctgtgccccaggctacactggccgccgctgtgagagctgtgcccccggatacgagggcaaccccatccagcccggcgggaagtgcaggcccgtcaaccaggagattgtgcgctgtgacgagcgtggcagcatggggacctccggggaggcctgccgctgtaagaacaatgtggtggggcgcttgtgcaatgaatgtgctgaccgctctttccacctgagtacccgaaaccccgatggctgcctcaagtgcttctgcatgggtgtcagtcgccactgcaccagctcttcatggagccgtgcccagttgcatggggcctctgaggagcctggtcacttcagcctgaccaacgccgcaagcacccacaccaccaacgagggcatcttctcccccacgcccggggaactgggattctcctccttccacagactcttatctggaccctacttctggagcctcccttcacgcttcctgggggacaaggtgacctcctatggaggagagctgcgcttcacagtgacccagaggtcccagccgggctccacacccctgcacgggcagccgttggtggtgctgcaaggtaacaacatcatcctagagcaccatgtggcccaggagcccagccccggccagcccagcaccttcattgtgcctttccgggagcaagcatggcagcggcccgatgggcagccagccacacgggagcacctgctgatggcactggcaggcatcgacaccctcctgatccgagcatcctacgcccagcagcccgctgagagcagggtctctggcatcagcatggacgtggctgtgcccgaggaaaccggccaggaccccgcgctggaagtggaacagtgctcctgcccacccgggtaccgtgggccgtcctgccaggactgtgacacaggctacacacgcacgcccagtggcctctacctgggtacctgtgaacgctgcagctgccatggccactcagaggcctgcgagccagaaacaggtgcctgccagggctgccagcatcacacggagggccctcggtgtgagcagtgccagccaggatactacggggacgcccagcgggggacaccacaggactgccagctgtgcccctgctacggagaccctgctgccggccaggctgcccacacttgttttctggacacagacggccaccccacctgtgatgcgtgctccccaggccacagtgggcgtcactgtgagaggtgcgcccctggctactatggcaaccccagccagggccagccatgccagagagacagccaggtgccagggcccataggctgcaactgtgacccccaaggcagcgtcagcagccagtgtgatgctgctggtcagtgccagtgcaaggcccaggtggaaggcctcacttgcagccactgccggccccaccacttccacctgagtgccagcaacccagacggctgcctgccctgcttctgtatgggcatcacccagcagtgcgccagctctgcctacacacgccacctgatctccacccactttgcccctggggacttccaaggctttgccctggtgaacccacagcgaaacagccgcctgacaggagaattcactgtggaacccgtgcccgagggtgcccagctctcttttggcaactttgcccaactcggccatgagtccttctactggcagctgccggagacataccagggagacaaggtggcggcctacggtgggaagttgcgatacaccctctcctacacagcaggcccacagggcagcccactctctgaccccgatgtgcagatcacgggcaacaacatcatgctagtggcctcccagccagcgctgcagggccctgagaggaggagctacgagatcatgttccgagaggaattctggcgccggcccgatgggcagccggccacacgcgagcacctcctgatggcactggccgacctggatgagctcctgatccgggccacgttctcctccgtgccgctggtggccagcatcagcgcagtcagcctggaggtcgcccagccggggccctcaaacagaccccgcgccctcgaggtggaggagtgccgctgcccgccaggctacatcggtctgtcctgccaggactgtgcccccggctacacgcgcaccgggagtgggctctacctcggccactgcgagctatgtgaatgcaatggccactcagacctgtgccacccagagactggggcctgctcgcaatgccagcacaacgccgcaggggagttctgcgagctttgtgcccctggctactacggagatgccacagccgggacgcctgaggactgccagccctgtgcctgcccactgaccaacccagagaacatgttttcccgcacctgtgagagcctgggagccggcgggtaccgctgcacggcctgcgaacccggctacactggccagtactgtgagcagtgtggcccaggttacgtgggtaaccccagtgtgcaagggggccagtgcctgccagagacaaaccaagccccactggtggtcgaggtccatcctgctcgaagcatagtgccccaaggtggctcccactccctgcggtgtcaggtcagtgggaggggaccccactacttctattggtcccgtgaggatgggcggcctgtgcccagcggcacccagcagcgacatcaaggctccgagctccacttccccagcgtccagccctcggatgctggggtctacatttgcacctgccgtaatctccaccgatccaataccagccgggcagagctgctggtcactgaggctccaagcaagcccatcacagtgactgtggaggagcagcggagccagagcgtgcgccccggagctgacgtcaccttcatctgcacagccaaaagcaagtccccagcctataccctggtgtggacccgcctgcacaacgggaaactgcccacccgagccatggatttcaatggcatcctgaccattcgcaacgtccagctgagtgatgcaggcacctacgtgtgcaccggctccaacatgtttgccatggaccagggcacagccactctacatgtgcaggcctcgggcaccttgtccgcccccgtggtctccatccatccgccacagctcacagtgcagcccgggcaactggcggagttccgctgcagcgccacagggagccccacgcccaccctcgagtggacagggggccccggcggccagctccctgcgaaggcacaaatccacggcggcatcctgcgcctgccagctgtcgagcccacggatcaggcccagtacttgtgccgagcccacagcagcgctgggcagcaggtggccagggctgtgctccacgtgcatgggggcggtgggcccagagtccaagtgagcccagagaggacccaggtccacgcaggccgcaccgtcaggctgtactgcagggctgcaggcgtgcctagcgccaccatcacctggaggaaggaagggggcagcctcccaccacaggcccggtcagagcgcacagacatcgcgacactgctcatcccagccatcacgactgctgacgccggcttctacctctgcgtggccaccagccctgcaggcactgcccaggcccggatccaagtggttgtcctttcagcctcagatgccagccaaccgccggtcaagattgagtcctcatcgccttctgtgacagaagggcaaacactcgacctcaactgtgtggtggcagggtcagcccatgcccaggtcacctggtacaggcgagggggtagcctgcctcaccacacccaggtgcacggctcccgtctgcggctcccccaggtctcaccagctgattctggagagtatgtgtgccgtgtggagaatggatcgggccccaaggaggcctccattactgtgtctgtgctccacggcacccattctggccccagctacaccccagtgcccggcagcacccggcccatccgcatcgagccctcctcctcacacgtggcggaagggcagaccctggatctgaactgcgtggtgcccgggcaggcccacgcccaggtcacgtggcacaagcgtgggggcagcctccctgcccggcaccagacccacggctcgctgctgcggctgcaccaggtgaccccggccgactcaggcgagtatgtgtgccatgtggtgggcacctccggccccctagaggcctcagtcctggtcaccatcgaagcctctgtcatccctggacccatcccacctgtcaggatcgagtcttcatcctccacagtggccgagggccagaccctggatctgagctgcgtggtggcagggcaggcccacgcccaggtcacatggtacaagcgtgggggcagcctccctgcccggcaccaggttcgtggctcccgcctgtacatcttccaggcctcacctgccgatgcgggacagtacgtctgccgggccagcaacggcatggaggcctccatcacggtcacagtaactgggacccagggggccaacttagcctaccctgccggcagcacccagcccatccgcatcgagccctcctcctcgcaagtggcggaagggcagaccctggatctgaactgcgtggtgcccgggcagtcccatgcccaggtcacgtggcacaagcgtgggggcagcctccctgtccggcaccagacccacggctccctgctgagactctaccaagcgtcccccgccgactcgggcgagtacgtgtgccgagtgttgggcagctccgtgcctctagaggcctctgtcctggtcaccattgagcctgcgggctcagtgcctgcacttggggtcacccccacggtccggatcgagtcatcgtcttcgcaagtggcagaggggcagaccctggacctgaactgcctcgttgctggtcaggcccatgcccaggtcacgtggcacaagcgcgggggcagcctcccggcccggcaccaggtgcatggctcgaggctacgcctgctccaggtgaccccagctgattcaggggagtacgtgtgccgtgtggtcggcagctcaggtacccaggaagcctcagtccttgtcaccatccagcagcgccttagtggctcccactcccagggtgtggcgtaccccgtccgcatcgagtcctcctcagcctccctggccaatggacacaccctggacctcaactgcctggttgccagccaggctccccacaccatcacctggtataagcgtggaggcagcttacccagccggcaccagatcgtgggctcccggctgcggatccctcaggtgactccggcagactcgggcgagtacgtgtgtcacgtcagtaacggtgcaggctcccgggagacctcgctcatcgtcaccatccagggcagcggttcctcccacgtgcccagagtctccccaccgatcaggatcgagtcgtcttcccccacggtggtggaagggcagaccttggatctgaactgcgtggtcgccaggcagccccaggctatcatcacatggtacaagcgtgggggcagccttccctcccgacaccagacccatggctcccacctgcggttgcaccaaatgtctgtggctgactcgggcgagtatgtgtgccgggccaacaacaacatcgatgccctggaggcctcaatcgtcatctccgtctcccctagcgccggcagcccctccgcccctggcagctccatgcccatcagaattgagtcatcctcctcacacgtggccgaaggggagaccctggatctgaactgcgtggtccccgggcaggcccatgcccaggtcacttggcacaagcgtgggggcagcctccccagttaccatcagacccgcggctcacggctgcggctgcaccatgtgtccccggccgactcgggtgaatacgtgtgccgggtgatgggcagctctggccccctggaggcctcagtcctcgtcaccatcgaagcctctggctcaagtgctgtccacgtccccgccccaggtggagccccacccatccgcatcgagccctcctcctcccgagtggcagaagggcagaccctggatctgaagtgcgtggtgcccgggcaggcccacgcccaggtcacgtggcacaagcgtggaggaaacctccctgcccggcaccaggtccacggcccactgctgaggctgaaccaggtgtccccggctgactctggcgagtactcgtgccaagtgaccggaagctcaggcaccctggaggcatctgtcctggtcacaattgagccctccagcccaggacccattcctgctccaggactggcccagcccatctacatcgaggcctcctcttcacacgtgactgaagggcagactctggatctgaactgtgtggtgcccgggcaggcccatgcccaggtcacgtggtacaagcgcgggggcagcctccccgcccggcaccagacccatggctcccagctgcggctccaccacgtctcccctgccgactcaggcgagtatgtgtgtcgtgcagccggcggcccaggccctgagcaagaagcctccttcacagtcaccgtcccgcccagtgaggggtcttcctaccgccttaggagcccggtcatctcgatcgacccgcccagcagcaccgtgcagcagggccaggatgccagcttcaagtgcctcatccatgacggggcagcccccatcagcctcgagtggaagacccggaaccaggagctggaggacaacgtccacatcagtcccaatggctccatcatcaccatcgtgggcacccggcccagcaaccacggtacctaccgctgcgtggcctccaatgcctacggtgtggcccagagtgtggtgaacctcagtgtgcacgggccccctacagtgtccgtgctccccgagggccccgtgtgggtgaaagtgggaaaggccgtcaccctggagtgtgtcagtgccggggagccccgctcctctgctcgttggacccggatcagcagcacccctgccaagttggagcagcggacatatgggctcatggacagccacacggtgctgcagatttcatcagctaaaccatcagatgcgggcacttatgtgtgccttgctcagaatgcactaggcacagcacagaagcaggtggaggtgatcgtggacacgggcgccatggccccaggggcccctcaggtccaagctgaagaagctgagctgactgtggaggctggacacacggccaccttgcgctgctcagccacaggcagccccgcgcgcaccatccactggtccaagctgcgttccccactgccctggcagcaccggctggaaggtgacacactcatcataccccgggtagcccagcaggactcgggccagtacatctgcaatgccactagccctgccgggcacgctgaggccaccatcatcctgcacgtggagagcccaccatatgccaccacggtcccagagcacgcttcggtgcaggcaggggagacggtgcagctccagtgcctggctcacgggacacccccactcaccttccagtggagccgcgtgggcagcagccttcctgggagggcgaccgccaggaacgagctgctgcactttgagcgtgcagcccctgaggactcaggccgctaccgctgccgggtcaccaacaaggtgggctcagccgaggcctttgcccagctgctcgtccaaggccctcccggctctctccctgccacctccatcccagcagggtccacgcccaccgtgcaggtcacgcctcagctagagaccaagagcattggggccagcgttgagttccattgtgctgtgcccagcgaccggggtacccagctccgttggttcaaggaagggggtcagctgcctcccggtcacagcgtgcaggatggggtgctccgaatccagaacttggaccagagctgccaagggacgtatatatgccaggcccatggaccttgggggaaggcccaggccagtgcccagctggttatccaagccctgccctcggtgctcatcaacatccggacctctgtgcagaccgtggtggttggccacgccgtggagttcgaatgcctggcactgggtgaccccaagcctcaggtgacatggagcaaagttggagggcacctgcggccaggcattgtgcagagcggaggtgtcgtcaggatcgcccacgtagagctggctgatgcgggacagtatcgctgcactgccaccaacgcagctggcaccacacaatcccacgtcctgctgcttgtgcaagccttgccccagatctcaatgccccaagaagtccgtgtgcctgctggttctgcagctgtcttcccctgcatagcctcaggctaccccactcctgacatcagctggagcaagctggatggcagcctgccacctgacagccgcctggagaacaacatgctgatgctgccctcagtccaaccccaggacgcaggtacctacgtctgcaccgccactaaccgccagggcaaggtcaaagcctttgcccacctgcaggtgccagagcgggtggtgccctacttcacgcagaccccctactccttcctaccgctgcccaccatcaaggatgcctacaggaagttcgagatcaagatcaccttccggcctgactcagccgatgggatgctgctgtacaatgggcagaagcgagtcccagggagccccaccaacctggccaaccggcagcccgacttcatctccttcggcctcgtggggggaaggcccgagttccggttcgatgcaggctcaggcatggccaccatccgccatcccacaccactggccctgggccatttccacaccgtgaccctgctgcgcagcctcacccagggctccctgattgtgggtgacctggccccggtcaacgggacctcccagggcaagttccagggcctggatctgaacgaggaactctacctgggtggctatcctgactatggtgccatccccaaggcggggctgagcagcggcttcataggctgtgtccgggagctgcgcatccagggcgaggagatcgtcttccatgacctcaacctcacggcgcacggcatctcccactgccccacctgtcgggaccggccctgccagaatggcggtcagtgccatgactctgagagcagcagctatgtgtgcgtctgcccagctggcttcaccgggagccgctgtgagcactcgcaggccctgcactgccatccagaggcctgtgggcccgacgccacctgtgtgaaccggcctgacggtcgaggctacacctgccgctgccacctgggccgctcggggttgcggtgtgaggaaggtgtgacagtgaccaccccctcgctgtcgggtgctggctcctacctggcactgcccgccctcaccaacacacaccacgagctacgcctggacgtggagttcaagccactcgcccctgacggggtcctgctgttcagcggggggaagagcgggcctgtggaggacttcgtgtccctggcgatggtgggcggccacctggagttccgctatgagttggggtcagggctggccgttctgcggacggccgagccgctggccctgggccgctggcaccgtgtgtctgcagagcgtctcaacaaggacggcagcctgcgggtgaatggtggacgccctgtgctgcgctcctcgcccggcaagagccagggcctcaacctgcacaccctgctctacctggggggtgtggagccttccgtgccactgtccccggccaccaacatgagcgctcacttccgcggctgtgtgggcgaggtgtcagtgaatggcaaacggctggacctcacctacagtttcctaggcagccagggcatcgggcaatgctatgacagctccccatgtgagcgccagccttgccaacatggtgccacgtgcatgcccgctggcgagtatgagttccagtgcctgtgtcgagatggaatcaaaggagacctgtgtgagcacgaggagaacccctgccagctccgtgaaccctgtctgcatgggggcacctgccagggcacccgctgcctctgcctccctggcttctctggcccacgctgccaacaaggctctggacatggcatagcagagtccgactggcatcttgaaggcagcgggggcaatgatgcccctgggcagtacggagcctatttccacgatgatggcttcctcgccttccctggccatgtcttctccaggagcctgcccgaggtgcccgagaccatcgagctggaggttcggaccagcacagccagtggcctcctgctctggcagggtgtggaggtgggagaggccggccaaggcaaggacttcatcagcctcgggcttcaagacgggcaccttgtcttcaggtaccagctgggtagtggggaggcccgcctggtctctgaggaccccatcaatgacggcgagtggcaccgggtgacagcactgcgggagggccgcagaggttccatccaagtcgacggtgaggagctggtcagcggccggtccccaggtcccaacgtggcagtcaacgccaagggcagcatctacatcggcggagcccctgacgtggccacgctgaccgggggcagattctcctcgggcatcacaggctgtgtcaagaacctggtgctgcactcggcccgacccggcgccccgcccccacagcccctggacctgcagcaccgcgcccaggccggggccaacacacgcccctgcccctcgtaggcacctgcctgccccacacggactcccgggccacgccccagcccgacaatgtcgagtatattattattaatattattatgaatttttgtaagaaaccgagcgatgccacgctttgctcgtaccgccctgggctggactggaggtgggcatgccaccctcacacacacagctgggcaaagccacaaggctggccagcaaggcaggttggatgggagtgggcacctcagaaagtcaccaggacttggggtcaggaacagtggctgggtgggcccagaactgcccccactgtccccctacccaccgatggagcccccagatagagctgggtggcctgtttctgcagcccttgggcagttctcactcctaggagagccaacctcggcttgtgggctggtgccccacagctacctgagacgggcatcgcaggagtctctgccacccactcaggattgggaattgtctttagtgccggctgtggagcaaaaggcagctcacccctgggcaggcggtccccatccccaccagctcgtttttcagcacccccacccacctccacccagcccctggcccc

SEQ ID NO: 47 - DNA, 954 bp, Homo sapiens
agccgtgtaccccgcagagccgccagccccgggcatgttccgagacttcggggaacccggcccgagctccgggaacggcggcgggtacggcggccccgcgcagcccccggccgcagcgcaggcagcccagcagaagttccacctggtgccaagcatcaacaccatgagtggcagtcaggagctgcagtggatggtacagcctcatttcctggggcccagcagttaccccaggcctctgacctaccctcagtacagccccccacaaccccggccaggagtcatccgggccctggggccgcctccaggggtacgtcgaaggccttgtgaacagatcagcccggaggaagaggagcgccgccgagtaaggcgcgagcggaacaagctggctgcggccaagtgcaggaaccggaggaaggaactgaccgacttcctgcaggcggagactgacaaactggaagatgagaaatctgggctgcagcgagagattgaggagctgcagaagcagaaggagcgcctagagctggtgctggaagcccaccgacccatctgcaaaatcccggaaggagccaaggagggggacacaggcagtaccagtggcaccagcagcccaccagccccctgccgccctgtaccttgtatctccctttccccagggcctgtgcttgaacctgaggcactgcacacccccacactcatgaccacaccctccctaactcctttcacccccagcctggtcttcacctaccccagcactcctgagccttgtgcctcagctcatcgcaagagtagcagcagcagcggagacccatcctctgacccccttggctctccaaccctcctcgctttgtgaggcgcctgagccctactccctgcagatgccaccctagccaatgtctcctccccttcccccaccggtccagctggcctggacagtatcccacatccaactccagc

SEQ ID NO: 48 - DNA, 2462 bp, Homo sapiens
gatctcagctccttttcagctagtgggtggaaccccaggagggaaaactcagggaagcccaggaggaagtgaaaataccccatggagtgaagcttgtgtgctacctgggttccgggccagtgatccagctcctggggggcatcagccacggccaggcaggggggcagctgccaccaaagctggaggttctagaggacttgatggaggtcagctcaccctcacctgcccagaggctcagaaggaagaaaaggcccatggtgcagggccctgctgggtgccaggttttccagccttctccttcaggaggcacagcaggggaccctggtggcctctctgaccccttctaccctccaagaagcggttccctggcccttggcgaccccagctcggaccctgcatgttcccagagtggcccaatggaggctgaagaggattctcttccggagcagccagaggactcagctcagctccaacaggagaagccatccctgtatattggggtgcggggcactgttgtccgttccatgcaggaggtactatggactcgccttcgggagctcccagacccagtgctgagtgaggaggtggtggagggcattgctgctggcattgaggcagccctctgggacctgacacaaggcaccaatggccggtacaagaccaagtatcgcagcctgctgttcaacctgcgggaccccaggaacctggacttgtttctcaaagtggttcatggagatgtcaccccctacgacctggtgcggatgagctcgatgcagctggccccccaggagctggcccgctggcgggaccaggaggagaaaaggggcctgaatatcattgagcagcaacagaaggagccgtgcagacttccagcctccaaaatgacccacaagggcgaagtggagattcagcgggacatggaccagacactgaccctggaggatctggtgggaccgcagatgttcatggactgcagcccacaggccctgcccatcgcatcagaggacaccacggggcagcatgaccaccacttcttagaccccaactgccacatctgcaaggactgggagccctcgaatgagctgctaggctccttcgaagccgccaagagctgcggggacaatatcttccagaaagccctaagccaaactcctatgcctgctccagagatgcccaaaaccagggagttgtctcccacggaaccacaggacagggtccctccatctgggctccatgtgcctgctgcacccacaaaggccctgccctgcctgccaccctgggaaggtgttctggacatgttctccatcaagcggttccgggccagggcccagctggtctcgggacacagctgtcggcttgtccaggctctgcccaccgtgatccgctcggcaggctgcatcccctccaacattgtctgggaccttctggccagcatctgcccagccaaggccaaggacgtctgcgtggtcagactgtgcccacatggggcccgggacacccagaactgccgcctgctctactcatacctcaatgataggcagcgccacgggctggcctctgtggagcacatggggatggtcctgctgcccctgcctgccttccagcccctgcccaccaggctgcgccctttggggggcccaggtctggaggtcactcactcaagtctgttgctggctgtgctgctccccaaggaagggcttccagacacagcagggtccagcccctggttggggaaggttcaaaagatggtctccttcaacagtaaggtggagaagagatactatcagccagatgacaggaggccgaatgtgcccctgaagggcacccctcccccaggaggtgcctggcagcagagccagggcaggggcagtatagctccaaggggaatctctgcttggcagaggccccccagaggcagggggaggctctggccagagcctgaaaactggcagcatcctgggcgagggcagtggcccccagagccaggcttgcgccagtcccagcatccctattcagtagcaccagctggtcatggctttggccgtggccagcacttccacagggactcctgtccccaccaagccctgctccggcacctcgaatccctggcgaccatgagtcaccagctccaagccttactgtgcccccagaccaagagctccatcccccgccctctgcagcgtttgtctagcgcccttgcagctccagagccccctggcccagcccgtgactcctctttggggcctacagatgaagctggctctgagtgtcccttccctagaaaggcctgaccctccttacccaccagaacaggggttttgatgccctcactagtgttgaagcctgttccagagagaggtgggactgcaaggagaggatggtcagccctacccacctgccctgtttgaacttcctgtttgacaatgtttgctgttgattttttgttcaataaagaatttggt

SEQ ID NO: 49 - DNA, 1695 bp, Homo sapiens
gcgggacggaagagggggtgaaggccagaggctcggggcttcaagaccgctgtctggagtccccctttccaggccatgtcggggcccacctggctgcccccgaagcagccggagcccgccagagcccctcaggggagggcgatcccccgcggcaccccggggccaccaccggcccacggagcagcactccagccccaccccagggtcaatttttgcccccttccatctgagcagtgttaccaggccccagggggaccggaggatcgggggccggcgtgggtggggtcccatggagtactccagcacacgcaggggctccctgcagacagggggggccttcgccctggaagcctggacgccgagatagacttgctgagcagcacgctggccgagctgaatgggggtcggggtcatgcgtcacggcgaccagaccgacaggcatatgagcccccgccacctcctgcctaccgcacgggctccctgaagccaaatccagcctcgccgctcccagcgtctccctatgggggccccactccagcctcttacactaccgccagcaccccggctggcccagccttccccgtgcaagtgaaggtggcacagccagtgaggggctgcggcccacccaggcggggagcctctcaggcctctgggcccctcccgggcccccactttcctctcccaggccgaggtgaagtctgggggcctggctataggagccagagagagccagggccaggggccaaagaggaagctgctggggtctctggccctgcaggaagaggaagaggaggcgagcacgggccccaggtgcccctgagccagcctccagaggatgagctggataggctgacgaagaagctggttcacgacatgaaccacccgcccagcggggagtactttggccagtgtggtggctgcggagaagatgtggttggggatggggctggggttgtggcctttgatcgcgtctttcacgtgggctgctttgtatgttctacatgccgggcccagcttcgcggccagcatttctacgccgtggagaggagggcatattgcgagggctgctacgtggccaccctggagaaatgtgccacgtgctcccagcccatcctggaccggatcctgcgggctatggggaaggcctaccaccctggctgcttcacctgcgtggtgtgtcaccgcggcctcgacggcatccccttcacagtggatgctacgagccagatccactgcattgaggactttcacaggaagtttgccccaagatgctcagtgtgcggtggggccataatgcctgagccaggtcaggaggagactgtgagaattgttgctctggatcgaagttttcacattggctgttacaagtgcgaggagtgtgggctgctgctctcctctgagggcgagtgtcagggctgctacccgctggatgggcacatcttgtgcaaggcctgcagcgcctggcgcatccaggagctctcagccaccgtcaccactgactgctgagtcttcctagaagtacctgctgggttctcagttccagttcccatcctttgattgatcactctccctgacatccacctgtatgactttgtcaccaaatgctgtcttctctttctccaatcaagaaataataatccctcgagtttacaaaacaaaaaaaaaaaaaaaaaaaaaaaaaaaaaaaaaaaaaaa

SEQ ID NO: 50 - DNA, 3286 bp, Homo sapiens
tagcagcgaatatactttacaccaaatctcagaagattcagaacttagatgagtggggcccaggacaggaaccctggagccttggaaggaggggagccccatctccccagaagagcagtgaccccagcagagaggggcctggtgtatcactggaggaaatagcctgccaaggaatacacgtcttcagaagaaattctgtgtggcttcaagagactgatcaaattgtgagaggaaaacagcctacccggtcctcttttcttcaatacaaaatgagataataggggttggaaggaaaaccttcaagacctatggaagtcagttgcagccagctcatcacatagaggtgcaggtgaggtgtattttcatcacggtggaaaattctggctgcttcatctccatctctagagccaatattggagcttttcaataaaagctatggcctcaaccaccagcaccaagaagatgatggaggaagccacctgctccatctgcctgagcctgatgacgaacccagtaagcatcaactgtggacacagctactgccacttgtgtataacagacttctttaaaaacccaagccaaaagcaactgaggcaggagacattctgctgtccccagtgtcgggctccatttcatatggatagcctccgacccaacaagcagctgggaagcctcattgaagccctcaaagagacggatcaagaaatgtcatgtgaggaacacggagagcagttccacctgttctgcgaagacgaggggcagctcatctgctggcgctgtgagcgggcaccacagcacaaagggcacaccacagctcttgttgaagacgtatgccagggctacaaggaaaagctccagaaagctgtgacaaaactgaagcaacttgaagacagatgtacggagcagaagctgtccacagcaatgcgaataactaaatggaaagagaaggtacagattcagagacaaaaaatccggtctgactttaagaatctccagtgtttcctacatgaggaagagaagtcttatctctggaggctggagaaagaagaacaacagactctgagtagactgagggactatgaggctggtctggggctgaagagcaatgaactcaagagccacatcctggaactggaggaaaaatgtcagggctcagcccagaaattgctgcagaatgtgaatgacactttgagcaggagttgggctgtgaagctggaaacatcagaggctgtctccttggaacttcatactatgtgcaatgtttccaagctttacttcgatgtgaagaaaatgttaaggagtcatcaagttagtgtgactctggatccagatacagctcatcacgaactaattctctctgaggatcggagacaagtgactcgtggatacacccaggagaatcaggacacatcttccaggagatttactgccttcccctgtgtcttgggttgtgaaggcttcacctcaggaagacgttactttgaagtggatgttggcgaaggaaccggatgggatttaggagtttgtatggaaaatgtgcagaggggcactggcatgaagcaagagcctcagtctggattctggaccctcaggctgtgcaaaaagaaaggctatgtagcacttacttctcccccaacttcccttcatctgcatgagcagcccctgcttgtgggaatttttctggactatgaggccggagttgtatccttttataacgggaatactggctgccacatctttactttcccgaaggcttccttctctgatactctccggccctatttccaggtttatcaatattctcctttgtttctgcctcccccaggtgactaaggaaaagagcagaagctccttggtttaaccagcacagagaaaataatataaatcccataagggcagacgtttggtctgttttcttcgctgtcatttccttagtagttagactagtgctgagattttagtggatatataattgatttatgttgaatatatggacttagcaactaaaaataccacagatggttaacctggactggggcaaagcaagataatagtgatgatcgtatgttgctgtctccatccgtctttaatgggtcagggctttgatttccaagggtcttcaggtgatgagtaggggtacccacaagtcagaaggtctgcgttctcctagtttgtttgctgccatttgaactcatgtagggaatgaaagaaagctgcaattatccgccaactgcatttaaaacaaaacaaaacagaaaaatcaaaataacattgactcttccaaccactgacatgttgtttaataatctaagcggcagtcctggaggctaccagacttactgagttctacctgagaaacagccaagcaaagtgtgagagaagggttaagactggcttacaatgagatgcttcaaatgaaaagggaattatgagtaaaattgaactttgatgggggattcagttctggaaaagaatttggtattttccagtctgctaggaccaattaccttgaaatattttaaaatctcagtaaatagttattgctgaaatggctgttggcagttcttattatgattcagagaagagcaaatagaccttaacttcattttgaaaaagaccaaattaccatacccgagtgagtaatgacaggactacaactaaaacataaacaacattaatgatgaccataaaaagtcacaaaattgctaaatgttataatttagagttgacataaaaattgatggccaggcatggtggctcacgcctgtaatcccagaactatgtgaggctgaggcaggtggatcacttgaggtcaggagttcaacaccagcctggccaacatggtgaaaccctgtctctactaaaaatacaaaaattagccgggcatggtggtaggggcctgtaacccagctactcgtgaggccaaggcaggagaattgcttgagcctgcagcagctgcagtaagccaagatcatgctgtgcctcaaggaaaaaaaaaattaatgtttactgatatttgttgaagtcctacaacatcacctctgagaataggagaaatgaagcaacagttgtgtctagatgtcagaggcatggctgggcctccatctctgcctaagggagatataaaagagttcaaactattgcccatgttccccagggtcagaagttctaattatgatgatagaggctgggttgtaagtagtaagtgaagggtagcagaatatgccatctttggcataagaagtattttgagttgaagacaattgagaaaaaaaaaaaaaaaaaa

SEQ ID NO: 51 - DNA, 4877 bp, Homo sapiens
gcccgaaacccggaagtgagcggcggcagctgcgaggctcggagaaacaggcgccgcgggctccgcgcccggccggacccgggcccgagatcatgatgctgccgccaccgccgccaccacggagcgagaagcccagatagacgccccggcggccccgggtcctggagtcccgccgcctgctgcccggccgaggaccccaccccgcctgccgcccgatgcttgcagtggggcccgccatggacagggattacccgcagcatgaacccccgccggcgggcagcctcctgtacagcccgccgcccctgcagagcgccatgctgcactgcccctactggaacaccttctcgctgccgccataccctgccttctccagcgacagccgcccgttcatgagctccgcctccttcctcggcagccagccctgcccagacaccagctatgcccccgtggccaccgcctccagcttgccaccaaagacctgcgactttgctcaggactcctcctattttgaggacttctccaacatctccatcttctcctcgtccgtggactccctgtcggacatcgtggacacgcccgacttcctgccggctgacagcctcaaccaggtgtccaccatctgggacgataaccctgccccctccacccacgataagctgttccagctcagcaggccgtttgcaggcttcgaggactttctgccctcccacagcaccccgcttctcgtcagctaccaggagcagagtgtgcagagccagccagaggaggaggacgaggctgaggaggaggaggcggaggagctggggcacacagagacctacgccgactacgtgccgtccaagtccaagatcgggaagcagcacccagaccgcgtggtggagaccagcacactgtccagcgtcccacccccagacatcacctacaccctggccctgccctcggacagcggggccctgtctgccctgcagctagaggccatcacctacgcctgccagcaacacgaggtcctgctccccagcgggcagcgcgcgggctttctcatcggcgatggggccggcgtgggcaaaggccggacggtggccggagtcatcctggagaaccacctgcgcggccggaagaaagcattgtggttcagcgtctccaacgacctcaagtacgatgcggagcgcgacctgcgggacatcgaagccacgggcatcgcggtgcacgcgctcagcaagatcaagtacggtgacaccactacctcagagggcgtcctcttcgccacctactccgccctgattggggagagccaggccggtggccagcaccgcactcgcctccggcagatcctggactggtgtggggaggcctttgagggcgtcatcgtgttcgacgagtgtcacaaagccaagaatgccggctccaccaagatgggcaaggccgtgctagacctgcagaacaagctgcccctggcccgcgtggtctacgccagcgccacaggtgcctctgagcctcggaacatgatctacatgagccgcttgggtatctggggcgagggcacacccttccggaactttgaggagttcctgcacgccatcgagaagaggggcgttggcgccatggagatcgtggccatggacatgaaggtcagcggcatgtacatcgcacgccagctcagcttctccggcgtcaccttccgcatcgaggagatcccgctggccccagccttcgagtgcgtctacaaccgcgcagccctgctgtgggccgaggccctgaacgtgttccagcaggcggccgactggatcggcctggagtcgcgcaagtccctgtggggccagttctggtcggcacaccagcgcttcttcaagtatctgtgcatcgcagccaaggtgcgccggctggtggagctggcccgagaggagctggcgcgagacaagtgcgtggtcatcgggctgcagtccacgggcgaggcgcgcacgcgggaggtgctgggggagaacgatgggcacctcaactgcttcgtctcggccgctgaaggcgtgttcctgtcgctaattcagaagcactttccgtccaccaagagaaagcgggacagaggagcgggcagcaagcggaaacggcgacctcggggacgcggggccaaagccccccggctggcgtgcgagacagcgggcgtcatccgcatcagtgacgacagcagcacggagtcggaccctggcctggacagcgacttcaactcctcccccgagtccctggtggatgacgacgttgtcatcgttgatgcagtcgggctccccagtgacgaccggggatccctgtgcctcctgcagagagacccgcatggccccggggtcctggagcgggtggagcggctgaagcaggatctgctggacaaagtgcgccggctgggccgggaactgccagtcaacaccctggacgagctcatcgaccagctgggcggcccccagcgggtggcggagatgaccggcaggaaaggccgcgtggtgtccaggcccgacgggacggtggccttcgagtcgcgggcagagcagggtctgtccatcgaccacgtgaacctcagggagaagcagcgcttcatgagcggcgagaagctcgtggccatcatctcggaggcctccagctcgggtgtctccctccaagccgaccgccgtgtccagaaccagcggcgccgcgtgcacatgaccttggagctgccgtggagcgccgaccgcgccatccagcagttcggccgcacccaccggtccaaccaggtctccgcgccagagtatgtcttcctcatctcggagctggccggggagcgccggttcgcctccatcgtggccaagcgcctggagagtctgggggccctgacccacggagaccgccgcgccacggagtcccgtgacctcagcaagtacaactttgagaacaagtatggcacccgggccctgcactgtgtcctcaccaccatcctgagccagactgagaacaaagtgcctgtgccccagggataccctggaggggtccccaccttcttccgggacatgaagcagggcctgctgtctgtgggcattggtggccgggagtcccggaatggctgcctggacgtggagaaggactgttccatcaccaagttcctgaaccgcatcctggggctggaggtgcacaagcagaatgccctgttccagtacttctcagacaccttcgaccacctcatcgagatggacaagcgggagggcaaatacgacatgggcatcctggaccttgctcccggtatcgaggagatctacgaggagagccagcaggtgttcctggctcccgggcacccgcaggacgggcaggtggtcttctacaagatcagcgtggaccgcggcctgaagtgggaggacgcctttgccaagtcgctggcgctgacgggcccctatgacggcttctacctctcctacaaggtccgcggtaacaagcccagctgcctgctggcggagcagaaccgcggccagttcttcacggtgtacaagcccaacatcggccggcagagccagctggaggccctggacagcctccgccgcaagttccaccgggtcaccgcggaggaggccaaggagccctgggagagtggctacgctttgtcgctgacgcactgcagccacagcgcctggaaccggcactgccggctggcgcaggagggtaaggactgcctgcaggggctgcggctgcggcaccactacatgctgtgcggcgcgctgctgcgcgtgtggggccgcatcgccgccgtcatggccgacgtcagcagcagcagctacctgcagatcgtgcggctgaagaccaaggacaggaagaagcaagtgggcatcaagatccccgagggctgcgtgcgccgggtgctgcaggagctgcggctgatggatgcggacgtgaagcgcaggcaggcgcccgccctgggctgccccgccccgcccgccccgcgcccgctggcgctgccttgcggccccggagaggtgctggacctcacctacagccccccggccgaggccttcccgccgcccccgcacttctctttcccggcgccgctgtccctggacgccggccccggcgtcgtgccgctgggcacccccgacgcccaggccgaccctgcggccctcgcgcaccagggctgcgacatcaacttcaaggaggtgctggaggacatgctgcgctcgctgcacgcggggccgccctccgagggcgcgctgggggagggcgcgggggcggggggcgcggcgggcggtggtcccgagcggcagagcgtgatccagttcagcccacccttccccggcgcccaggctcctctctgacacgcctttaggcgaaacatgccccaagacacagggaccgtttctcccctaggagcagcggtggggagcagggccaaggtcccctgaccactgctcagaggagccctaggccctggccgcagtgccttcagcgcccgacccgggcccccacctggtcagccctggcggggcccactcaggacagctgggggccggggcgtggcagggccctctctgtgcctctcctcctaagtaggaaggggctccgggtggctgctctgggactgggcacccacaagggctcagtgggcccaaacccttgaaatccgtgaaaccgggtggtcccaagagctagaaactcaggaaaccccaggtgctcagggccccgcgtctcgggggctccgtggggcagacccctgctaatatatgcaattctccctcccccagcccttccctgacccctaagttattgcccgctcacctctcccaggccccaggccgcggagctggcagggtggcgcctgcggtttctatgtatttatagcaagttctgatgtacatatgtaaaggacttttttaaat

SEQ ID NO: 52 - DNA, 1660 bp, Homo sapiens
tctatgaaaccaacatacatggcgtttgcatcacagttggagtcagatgtgagcccggagggcaggtgtctggcttgtccacccggaagccctgagggcagctgttcccactggctctgctgaccttgtgccttggacggctgtcctcagcgaggggccgtgcacccgctcctgagcagcgccatgggcctgctggccttcctgaagacccagttcgtgctgcacctgctggtcggctttgtcttcgtggtgagtggtctggtcatcaacttcgtccagctgtgcacgctggcgctctggccggtcagcaagcagctctaccgccgcctcaactgccgcctcgcatactcactctggagccaactggtcatgctgctggagtggtggtcctgcacggagtgtacactgttcacggaccaggccacggtagagcgctttgggaaggagcacgcagtcatcatcctcaaccacaacttcgagatcgacttcctctgtgggtggaccatgtgtgagcgcttcggagtgctggggagctccaaggtcctcgctaagaaggagctgctctacgtgcccctcatcggctggacgtggtactttctggagattgtgttctgcaagcggaagtgggaggaggaccgggacaccgtggtcgaagggctgaggcgcctgtcggactaccccgagtacatgtggtttctcctgtactgcgaggggacgcgcttcacggagaccaagcaccgcgttagcatggaggtggcggctgctaaggggcttcctgtcctcaagtaccacctgctgccgcggaccaagggcttcaccaccgcagtcaagtgcctccgggggacagtcgcagctgtctatgatgtaaccctgaacttcagaggaaacaagaacccgtccctgctggggatcctctacgggaagaagtacgaggcggacatgtgcgtgaggagatttcctctggaagacatcccgctggatgaaaaggaagcagctcagtggcttcataaactgtaccaggagaaggacgcgctccaggagatatataatcagaagggcatgtttccaggggagcagtttaagcctgcccggaggccgtggaccctcctgaacttcctgtcctgggccaccattctcctgtctcccctcttcagttttgtcttgggcgtctttgccagcggatcacctctcctgatcctgactttcttggggtttgtgggagcagcttcctttggagttcgcagactgataggagtaactgagatagaaaaaggctccagctacggaaaccaagagtttaagaaaaaggaataattaatggctgtgactgaacacacgcggccctgacggtggtatccagttaactcaaaaccaacacacagagtgcaggaaaagacaattagaaactatttttcttattaactggtgactaatattaacaaaacttgagccaagagtaaagaattcagaaggcctgtcaggtgaagtcttcagcctcccacagcgcagggtcccagcatctccacgcgcgcccgtgggaggtgggtccggccggagaggcctcccgcggacgccgtctctccagaactccgcttccaagagggacctttggctgctttctctccttaaacttagatcaaattttaaaaaaaaaaaaaaa

SEQ ID NO: 53 - DNA, 2533 bp, Homo sapiens
cgcagccctggcgcagacgcgtgggctccgtggcgatgcggggtgttgcctgaggctccactgaagctatggcataatttgcagaatttgcacttcattacttttctgaaattcaaacaaattctgaaactgcacgagttctggctgagagctgtggatctgtgcattttgatggtgacagtgcctacgtggggatgagtgacggaaacccagagctcctgtcaaccagccagacctacaacggccagagcgagaacaacgaagactatgagatccccccgataacacctcccaacctcccggagccatccctcctgcacctgggggaccacgaagccagctaccactcgctgtgccacggcctcacccccaacggtctgctccctgcctactcctatcaggccatggacctcccagccatcatggtgtccaacatgctagcacaggacagccacctgctgtcgggccagctgcccacgatccaggagatggtccactcggaagtggctgcctatgactcgggccggcccgggcccctgctgggtcgcccggcaatgctggccagccacatgagtgccctcagccagtcccagctcatctcgcagatgggcatccggagcagcatcgcccacagctccccatcaccgccggggagcaagtcagcgaccccctctccctccagctccactcaggaagaggagtcggaagtgcatttcaagatctcgggagaaaagagaccttcagccgacccaggaaaaaaggccaagaacccgaagaagaagaaaaagaaggaccccaatgagccgcagaagcctgtgtcggcctacgcactcttcttcagagacactcaggccgccatcaagggtcagaaccccagtgccactttcggtgacgtgtccaaaatcgtggcctccatgtgggacagcctgggagaggaacagaagcaggcctacaagaggaagacagaagcagcaaagaaggaatatctgaaggccctggcagcctaccgggctagcctcgtctccaagagctccccagatcaaggtgagaccaagagcactcaggcaaacccaccagccaaaatgctcccacccaagcagcccatgtatgccatgccaggcctggcctccttcctgacgccgtcggacctgcaggccttccgcagtggggcctcccctgccagcctcgcccggacgctgggctccaagtctctgctgccaggcctcagtgcgtccccgccgccgccaccctccttcccgctcagccccacactgcaccagcagctgtcactgccccctcacgcccagggcgccctcctcagtccacctgttagcatgtccccagccccccagccccctgtcctgcccacccccatggcactccaggtgcagctggcgatgagcccctcacctccagggccacaggacttcccgcacatctctgagttccccagcagctcgggatcctgctcacctggcccatccaaccccaccagcagcggggactgggacagcagctaccccagtggggagtgtggcatcagcacctgcagcctgctccccagggacaaatcgctctacctcacctaatcccgcctccctaccatccctgaggctcgctggaaggcactgctcagagcctgaagggctgacagcagaaaagaggccctggccagaggcagggtggcccatcggagagagcagtgacacacccattgcccgggggctgagtctcttcctcaacctcccaccagactctgcagaggcagcccactgcccaccaccagcccaaagaacctgcaggaaccttccgcccgctgacctgcttgctccagggtaactgtggaccctgtcctcgccctgcgcacggtaccctatgtctggacacccggccccagctccagccccagcccaggtgggccgcccctggcggggtcgcttaccaacggacacccaccccagatgcatgggccagagggccggcccccggcatagatgtgcacatcggttttccagtgtgaacaaaagattacgaaacctagaaactgttggttccgtgtaagtagttgactacgtgttttagaactgtgctgaagacatctgtaagactattttgtgggggaaaaaagtagtttcctttaaggtaaaaagcattttatatgatccttagcacatttttaagttttatcttaagggagacgcgcacaaaagcggctgccaaaccgtttcgtcatcctcacagcaaggaccggacgcttgctagccaccccggagcactgctctccttttaatcatgtattcatctattttaaattgccggcgacgacttttgtctatttatgaagaaaccttgagaacgaagttacagcttatcctaccgtgtgtgtggttttggggtttcgtttgggtttgggttcttgacgtcgtttgcagctgtttcctggccctggcgagtgtctgtcttggtgcccagtgcttctctcaaatctctttataataaaacttctgaaaagctgaaaaaaaaaaaaaaaaaa

SEQ ID NO: 54 - DNA, 3356 bp, Homo sapiens
attaaattcatgtattgaaaatattgttcagaccccatgtgacataactggagccagtgcagtgccatgaagaactacgagattagcctggatattaacttgtcttctagagaatagatttcatgttccattcttctgcaatggttaattcacacagaaaaccaatgtttaacattcacagaggattttactgcttaacagccatcttgccccaaatatgcatttgttctcagttctcagtgccatctagttatcacttcactgaggatcccggggctttcccagtagccactaatggggaacgatttccttggcaggagctaaggctccccagtgtggtcattcctctccattatgacctctttgtccaccccaatctcacctctctggactttgttgcatctgagaagatcgaagtcttggtcagcaatgctacccagtttatcatcttgcacagcaaagatcttgaaatcacgaatgccacccttcagtcagaggaagattcaagatacatgaaaccaggaaaagaactgaaagttttgagttaccctgctcatgaacaaattgcactgctggttccagagaaacttacgcctcacctgaaatactatgtggctatggacttccaagccaagttaggtgatggctttgaagggttttataaaagcacatacagaactcttggtggtgaaacaagaattcttgcagtaacagattttgagccaacccaggcacgcatggctttcccttgctttgatgaaccgttgttcaaagccaacttttcaatcaagatacgaagagagagcaggcatattgcactatccaacatgccaaaggttaagacaattgaacttgaaggaggtcttttggaagatcactttgaaactactgtaaaaatgagtacataccttgtagcctacatagtttgtgatttccactctctgagtggcttcacttcatcaggggtcaaggtgtccatctatgcatccccagacaaacggaatcaaacacattatgctttgcaggcatcactgaagctacttgatttttatgaaaagtactttgatatctactatccactctccaaactggatttaattgctattcctgactttgcacctggagccatggaaaattggggcctcattacatatagggagacgtcactgctttttgaccccaagacctcttctgcttccgataaactgtgggtcaccagagtcatagcccatgaactggcgcaccagtggtttggcaacctggtcacaatggaatggtggaatgatatttggcttaaggagggttttgcaaaatacatggaacttatcgctgttaatgctacatatccagagctgcaatttgatgactattttttgaatgtgtgttttgaagtaattacaaaagattcattgaattcatcccgccctatctccaaaccagcggaaaccccgactcaaatacaggaaatgtttgatgaagtttcctataacaagggagcttgtattttgaatatgctcaaggattttctgggtgaggagaaattccagaaaggaataattcagtacttaaagaagttcagctatagaaatgctaagaatgatgacttgtggagcagtctgtcaaatagttgtttagaaagtgattttacatctggtggagtttgtcattcggatcccaagatgacaagtaacatgctcgcctttctgggggaaaatgcagaggtcaaagagatgatgactacatggactctccagaaaggaatccccctgctggtggttaaacaagacgggtgttcactccgactgcaacaggagcgcttcctccagggggttttccaggaagaccctgaatggagggccctgcaggagaggtacctgtggcatatcccattgacctactccacgagttcttctaatgtgatccacagacacattctaaaatcaaagacagatactctggatctacctgaaaagaccagttgggtgaaatttaatgtggactcaaatggttactacatcgttcactatgagggtcatggatgggaccaactcattacacagctgaatcagaaccacacacttctcagacctaaggacagagtaggtctgattcatgatgtgtttcagctagttggtgcagggagactgaccctagacaaagctcttgacatgacttactacctccaacatgaaacaagcagccccgcacttctcgaaggtctgagttacttggaatcgttttaccacatgatggacagaaggaatatttcagatatctctgaaaacctcaagcgttaccttcttcagtattttaagccagtgattgacaggcaaagctggagtgacaagggctcagtctgggacaggatgctccgctcggctctcttgaagctggcctgtgacctgaaccatgctccttgcatccagaaagctgctgaactcttctcccagtggatggaatccagtggaaaattaaatataccaacagatgttttaaagattgtgtattctgtgggtgctcagacaacagcaggatggaattaccttttagagcaatatgaactgtcaatgtcaagtgctgaacaaaacaaaattctgtatgctttgtcaacgagcaagcatcaggaaaagttactgaagttaattgaactaggaatggaaggaaaggttatcaagacacagaacttggcagctctccttcatgcgattgccagacgtccaaaggggcagcaactagcatgggattttgtaagagaaaattggacccatcttctgaaaaaatttgacttgggctcatatgacataaggatgatcatctctggcacaacagctcacttttcttccaaggataagttgcaagaggtgaaactattttttgaatctcttgaggctcaaggatcacatctggatatttttcaaactgttctggaaacgataaccaaaaatataaaatggctggagaagaatcttccgactctgaggacttggctaatggttaatacttaaatggtcaatagaaaaagtaggctgggcgcggtggctcacgcctgtaatcccagcactttgggaggctgagaagggcggatcacgaggtcaggagatggagaccatcctggctaacacggtgagaccccgtctccgctaaaaatacaaaaaattagccgggcatggtggcaggtgcctgtagtcccagctactcggcaggctgcagcaggaaaatggcataaacccgggaggtggagcttgcagtgagccgagattgcgccactgcattccagcctgggtgactgagcgagactctgtctcaaaaaaaaaaaaaaaaaaaaaaaaaaaaaaaagaaaaaaaaaaaaaaaaaa

SEQ ID NO: 55 - DNA, 3442 bp, Homo sapiens
agccggtgcgccgcagactagggcgcctcgggccagggagcgcggaggagccatggccaccgctaacggggccgtggaaaacgggcagccggacgggaagccgccggccctgccgcgccccatccgcaacctggaggtcaagttcaccaagatatttatcaacaatgaatggcacgaatccaagagtgggaaaaagtttgctacatgtaacccttcaactcgggagcaaatatgtgaagtggaagaaggagataagcccgacgtggacaaggctgtggaggctgcacaggttgccttccagaggggctcgccatggcgccggctggatgccctgagtcgtgggcggctgctgcaccagctggctgacctggtggagagggaccgcgccaccttggccgccctggagacgatggatacagggaagccatttcttcatgcttttttcatcgacctggagggctgtattagaaccctcagatactttgcagggtgggcagacaaaatccagggcaagaccatccccacagatgacaacgtcgtatgcttcaccaggcatgagcccattggtgtctgtggggccatcactccatggaacttccccctgctgatgctggtgtggaagctggcacccgccctctgctgtgggaacaccatggtcctgaagcctgcggagcagacacctctcaccgccctttatctcggctctctgatcaaagaggccgggttccctccaggagtggtgaacattgtgccaggattcgggcccacagtgggagcagcaatttcttctcaccctcagatcaacaagatcgccttcaccggctccacagaggttggaaaactggttaaagaagctgcgtcccggagcaatctgaagcgggtgacgctggagctgggggggaagaacccctgcatcgtgtgtgcggacgctgacttggacttggcagtggagtgtgcccatcagggagtgttcttcaaccaaggccagtgttgcacggcagcctccagggtgttcgtggaggagcaggtctactctgagtttgtcaggcggagcgtggagtatgccaagaaacggcccgtgggagaccccttcgatgtcaaaacagaacaggggcctcagattgatcaaaagcagttcgacaaaatcttagagctgatcgagagtgggaagaaggaaggggccaagctggaatgcgggggctcagccatggaagacaaggggctcttcatcaaacccactgtcttctcagaagtcacagacaacatgcggattgccaaagaggagattttcgggccagtgcaaccaatactgaagttcaaaagtatcgaagaagtgataaaaagagcgaatagcaccgactatggactcacagcagccgtgttcacaaaaaatctcgacaaagccctgaagttggcttctgccttagagtctggaacggtctggatcaactgctacaacgccctctatgcacaggctccatttggtggctttaaaatgtcaggaaatggcagagaactaggtgaatacgctttggccgaatacacagaagtgaaaactgtcaccatcaaacttggcgacaagaacccctgaaggaaaggcggggctccttcctcaaacatcggacggcggaatgtggcagatgaaatgtgctggaggaaaaaaatgacatttctgaccttcccgggacacattcttctggaggctttacatctactggagttgaatgattgctgttttcctctcactctcctgtttattcaccagactggggatgcctataggttgtctgtgaaatcgcagtcctgcctggggagggagctgttggccatttctgtgtttccctttaaaccagatcctggagacagtgagatactcagggcgttgttaacagggagtggtatttgaagtgtccagcagttgcttgaaatgctttgccgaatctgactccagtaagaatgtgggaaaaccccctgtgtgttctgcaagcagggctcttgcaccagcggtctcctcagggtggacctgcttacagagcaagccacgcctctttccgaggtgaaggtgggaccattccttgggaaaggattcacagtaaggttttttggtttttgttttttgttttcttgtttttaaaaaaaggatttcacagtgagaaagttttggttagtgcataccgtggaagggcgccagggtctttgtggattgcatgttgacattgaccgtgagattcggcttcaaaccaatactgcctttggaatatgacagaatcaatagcccagagagcttagtcaaagacgatatcacggtctaccttaaccaaggcactttcttaagcagaaaatattgttgaggttacctttgctgctaaagatccaatcttctaacgccacaacagcatagcaaatcctaggataattcacctcctcatttgacaaatcagagctgtaattcactttaacaaattacgcatttctatcacgttcactaacagcttatgataagtctgtgtagtcttccttttctccagttctgttacccaatttagattagtaaagcgtacacaactggaaagactgctgtaataacacagccttgttatttttaagtcctattttgatattaatttctgattagttagtaaataacacctggattctatggaggacctcggtcttcatccaagtggcctgagtatttcactggcaggttgtgaatttttcttttcctctttgggaatccaaatgatgatgtgcaatttcatgttttaacttgggaaactgaaagtgttcccatatagcttcaaaaacaaaaacaaatgtgttatccgacggatacttttatggttactaactagtactttcctaattgggaaagtagtgcttaagtttgcaaattaagttggggagggcaataataaaatgagggcccgtaacagaaccagtgtgtgtataacgaaaaccatgtataaaatgggcctatcacccttgtcagagatataaattaccacatttggcttcccttcatcagctaacacttatcacttatactaccaataacttgttaaatcaggatttggcttcatacactgaattttcagtattttatctcaagtagatatagacactaaccttgatagtgatacgttagagggttcctattcttccattgtacgataatgtctttaatatgaaatgctacattatttataattggtagagttattgtatctttttatagttgtaagtacacagaggtggtatatttaaacttctgtaatatactgtatttagaaatggaaatatatatagtgttaggtttcacttcttttaaggtttacccctgtggtgtggtttaaaaatctataggcctgggaattccgatcctagctgcagatcgcatcccacaatgcgagaatgataaaataaaattggatatttgaga

SEQ ID NO: 56 - DNA, 6829 bp, Homo sapiens
cttctctcccagggcggtgcgacccggagctccagcgcccgagtctccacttcgtttgctgaaacttgctttctaccagctaagaaccatgctgcgagtgattgtggaatctgccagcaatatccctaaaacgaaatttggcaagccggatcctattgtttctgtcatttttaaggatgagaaaaagaaaacaaagaaagttgataatgaattgaaccctgtctggaatgagattttggagtttgacttgaggggtataccactggacttttcatcttcccttgggattattgtgaaagattttgagacaattggacaaaataaattaattggcacggcgactgtagccctgaaggacctgactggtgaccagagcagatccctgccgtacaagctgatctccctgctaaatgaaaaagggcaagatactggggccaccattgacttggtgatcggctatgatccgccttctgctccacatccaaatgacctgagcgggcccagcgtgccaggcatgggaggagatggggaagaagatgaaggtgatgaagacaggttggacaatgcagtcaggggccctgggcccaaggggccagttgggacggtgtcggaagctcagcttgctcggaggctcaccaaagtaaagaacagccggcggatgctgtcaaataagccacaggacttccagatccgcgtccgagtgattgagggccgacagttaagtggtaacaacataaggcctgtggtcaaagttcacgtctgtggccagacacaccgaacaagaatcaagagaggaaacaaccctttttttgatgagttgtttttctacaatgtcaacatgaccccttctgaattgatggatgagatcatcagcatccgggtttataattctcactctctgcgggcagattgtctgatgggggaatttaagattgatgttggatttgtttatgatgaacctggccatgctgtcatgagaaagtggcttcttctcaatgacccggaagataccagttcaggttctaaaggttatatgaaagtcagcatgtttgtcctgggaaccggagatgagcctcctcctgagagacgagatcgtgataatgacagtgatgatgtggagagtaatttgttactccctgctggcattgccctccggtgggtgaccttcttgctgaaaatctaccgagctgaggacatcccccagatggatgatgccttctcacagacagtaaaggaaatatttggaggcaatgcagataagaaaaatctcgtggatccttttgtagaagtttcctttgctggaaaaaaggtttgtacaaacataattgagaaaaatgcaaacccagagtggaatcaggtcgtcaatcttcagatcaagtttccttcagtgtgtgaaaaaataaaactaacaatatatgactgggaccgtcttactaaaaatgatgtagttggaacaacatatctacacctctctaaaattgctgcctctggtggggaagtggaagatttctcatcttcgggaactggggctgcatcatatacagtaaacacaggagaaacagaggtaggctttgttccaacgtttggaccttgttacctgaatctttatggaagccccagggagtacacgggattcccagacccctatgatgagctgaatactggaaagggggaaggagttgcctacagaggcaggatcttggttgaattagccacttttcttgagaagacaccaccagataaaaagcttgagcccatttcaaatgatgacctgctggttgttgagaaataccagcgaaggcggaagtacagcctgtctgccgtgtttcattcagccaccatgttgcaagatgttggtgaggccattcagtttgaagtcagcattgggaactatggcaacaagtttgacaccacctgtaagcctttggcatcaacaactcagtacagccgtgctgtatttgatggcaactactattattacttgccttgggcccacaccaagccagttgttaccctgacttcatactgggaggatattagtcatcgcctggatgcggtgaacactctcctagctatggcagaacggctgcaaacaaatatagaagctctaaaatcagggatacaaggtaaaattcctgcaaaccagctggctgaattgtggctgaagctgatagatgaagttatagaagacacgagatacacgttgcctctcacagaaggaaaagccaacgtcacagttctcgatactcagatccgaaagctgcggtccaggtctctctcccaaatacatgaggcggctgtgaggatgaggtcggaagccacagatgtgaagtccacactggcagaaattgaggactggcttgataaattaatgcagctgactgaagagccacagaacagcatgcctgacatcatcatctggatgatccggggagagaagagactggcctatgcacgaattcccgcacatcaggtcttgtactccaccagtggtgagaatgcatctggaaaatactgtgggaaaacccaaaccatctttctgaagtatccacaggagaaaaacaacgggccaaaggtgcctgtggagttgcgagtgaacatctggctaggcttaagtgctgtggagaagaagtttaacagcttcgcagaaggaactttcaccgtctttgctgaaatgtatgaaaatcaagctctcatgtttggaaaatggggtacttctggattagtaggacgtcataagttttctgatgtcacaggaaaaataaaactcaagagggaattttttctgcctccaaaaggctgggaatgggaaggagagtggatagttgatcctgaaagaagcttgctgactgaggcagatgcaggtcacacggagttcactgatgaagtctatcagaacgagagccgctaccccgggggcgactggaagccggccgaggacacctacacggatgcgaacggcgataaagcagcatcacccagcgagttgacttgtcctccaggttgggaatgggaagatgatgcatggtcttatgacataaatcgagcggtggatgagaaaggctgggaatatggaatcaccattcctcctgatcataagcccaaatcctgggttgcagcagagaaaatgtaccacactcatagacggcgaaggctggtccgaaaacgcaagaaagatttaacacagactgcttcaagcaccgcaagggccatggaggaattgcaagaccaagagggctgggaatatgcttctctaattggctggaaatttcactggaaacaacgtagttcagataccttccgccgcagacgctggaggagaaaaatggctccttcagaaacacatggtgcagctgccatctttaaacttgaaggtgcccttggggcagacactaccgaagatggggatgagaagagcctggagaaacagaagcacagtgccaccactgtgttcggagcaaacacccccattgtttcctgcaattttgacagagtctacatctaccatctgcgctgctatgtctatcaagccagaaacctcttggctttagataaggatagcttttcagatccatatgctcatatctgtttcctccatcggagcaaaaccactgagatcatccattcaaccctgaatcccacgtgggaccaaacaattatattcgatgaagttgaaatctatggggaaccccaaacagttctacagaatccacccaaagttatcatggaactttttgacaatgaccaagtgggcaaagatgaatttttaggacgaagcattttctctcctgtggtgaaactgaactcagaaatggacatcacacccaaacttctctggcacccagtaatgaatggagacaaagcctgcggggatgttcttgtaactgcagagctgattctgaggggcaaggatggctccaaccttcccattcttccccctcaaagggcgccaaatctatacatggtcccccaggggatcaggcctgtggtccagctcactgccattgagattctagcttggggcttaagaaatatgaaaaacttccagatggcttctatcacatcccccagtcttgttgtggagtgtggaggagaaagggtggaatcggtggtgatcaaaaaccttaagaagacacccaactttccaagttctgttctcttcatgaaagtgttcttgcccaaggaggaattgtacatgcccccactggtgatcaaggtcatcgaccacaggcagtttgggcggaagcctgtcgtcggccagtgcaccatcgagcgcctggaccgctttcgctgtgacccttatgcagggaaagaggacatcgtcccacagctcaaagcctcccttctgtctgccccaccatgccgggacatcgttatcgaaatggaagacaccaaaccattactggcttctaagctgacagaaaaggaggaagaaatcgtggactggtggagtaaattttatgcttcctcaggggaacatgaaaaatgcggacagtatattcagaaaggctattccaagctcaagatatataattgtgaactagaaaatgtagcagaatttgagggcctgacagacttctcagatacgttcaagttgtaccgaggcaagtcggatgaaaatgaagatccttctgtggttggagagtttaagggctcctttcggatctaccctctgccggatgaccccagcgtgccagcccctcccagacagtttcgggaattacctgacagcgtcccacaggaatgcacggttaggatttacattgttcgaggcttagagctccagccccaggacaacaatggcctgtgtgacccttacataaaaataacactgggcaaaaaagtcattgaagaccgagatcactacattcccaacactctcaacccagtctttggcaggatgtacgaactgagctgctacttacctcaagaaaaagacctgaaaatttctgtctatgattatgacacctttacccgggatgaaaaagtaggagaaacaattattgatctggaaaaccgattcctttcccgctttgggtcccactgcggcataccagaggagtactgtgtttctggagtcaatacctggcgagatcaactgagaccaacacagctgcttcaaaatgtcgccagattcaaaggcttcccacaacccatcctttccgaagatgggagtagaatcagatatggaggacgagactacagcttggatgaatttgaagccaacaaaatcctgcaccagcacctcggggcccctgaagagcggcttgctcttcacatcctcaggactcaggggctggtccctgagcacgtggaaacaaggactttgcacagcaccttccagcccaacatttcccagggaaaacttcagatgtgggtggatgttttccccaagagtttggggccaccaggccctcctttcaacatcacaccccggaaagccaagaaatactacctgcgtgtgatcatctggaacaccaaggacgttatcttggacgagaaaagcatcacaggagaggaaatgagtgacatctacgtcaaaggctggattcctggcaatgaagaaaacaaacagaaaacagatgtccattacagatctttggatggtgaagggaattttaactggcgatttgttttcccgtttgactaccttccagccgaacaactctgtatcgttgcgaaaaaagagcatttctggagtattgaccaaacggaatttcgaatcccacccaggctgatcattcagatatgggacaatgacaagttttctctggatgactacttgggtttcctagaacttgacttgcgtcacacgatcattcctgcaaaatcaccagagaaatgcaggttggacatgattccggacctcaaagccatgaacccccttaaagccaagacagcctccctctttgagcagaagtccatgaaaggatggtggccatgctacgcagagaaagatggcgcccgcgtaatggctgggaaagtggagatgacattggaaatcctcaacgagaaggaggccgacgagaggccagccgggaaggggcgggacgaacccaacatgaaccccaagctggacttaccaaatcgaccagaaacctccttcctctggttcaccaacccatgcaagaccatgaagttcatcgtgtggcgccgctttaagtgggtcatcatcggcttgctgttcctgcttatcctgctgctcttcgtggccgtgctcctctactctttgccgaactatttgtcaatgaagattgtaaagccaaatgtgtaacaaaggcaaaggcttcatttcaagagtcatccagcaatgagagaatcctgcctctgtagaccaacatccagtgtgattttgtgtctgagaccacaccccagtagcaggttacgccatgtcaccgagccccattgattcccagagggtcttagtcctggaaagtcaggccaacaagcaacgtttgcatcatgttatctcttaagtattaaaagttttattttctaaagtttaaatcatgtttttcaaaatatttttcaaggtggctggttccatttaaaaatcatctttttatatgtgtcttcggttctagacttcagcttttggaaattgctaaatagaattcaaaaatctctgcatcctgaggtgatatacttcatatttgtaatcaactgaaagagctgtgcattataaaatcagttagaatagttagaacaattcttatttatgcccacaaccattgctatattttgtatggatgtcataaaagtctatttaacctctgtaatgaaactaaataaaaatgtttcacctttaaaaaaaaaaaaaaaaaaaaaa

SEQ ID NO: 57 - DNA, 647 bp, Homo sapiens
ttttgtaggttacagcctcagcaatctgtgtcatttgaaagcaaatatcctgatatttttaaataaggtgagcagggcaggcaggaaaccaatatttagtacttttgtgattaaacattctagaccaggcttgttgatatgtatgccaatagcctagaatttttggcttagtgtaaaataaaaatgtcttttctattgtggtctgatatccgtttctgtaataagatcagtttgttgtcctctgtgcaccagtggttttgcccttaattttttttggctagcatcaccaagatctgtcatccagagctgctgagaaaaatacatgttgccaaacttttcttaaaattgtgctgccagtggtattttcccagatgtgaaaaataataatctaataaaggattaatatctaataacaataccattgttgaacatgctcatggaatgtccaccttcttctgattccttttttgtatttgaaaatgcaatggtgtgttccaaattattggtggtgttgttaatgtcatgactctcctttgaatagaataaaaataaccccttttgttttgggttttctactgaaattagattttcctcttagtcctatgtgaaaaaaaagctttttgaaataaaaaaaaaaaaaaacaact

SEQ ID NO: 58 - DNA, 4164 bp, Homo sapiens
cactctggctgggagcagaaggcagcctcggtctctgggcggcggcggcggccctctctgccctggccgcgctgtgtggtgaccgcaggcccgagacatgagggcggcccgtgctctgctgcccctgctgctgcaggcctgctggacagccgcgcaggatgagccggagaccccgagggccgtggccttccaggactgccccgtggacctgttctttgtgctggacacctctgagagcgtggccctgaggctgaagccctacggggccctcgtggacaaagtcaagtccttcaccaagcgcttcatcgacaacctgagggacaggtactaccgctgtgaccgaaacctggtgtggaacgcaggcgcgctgcactacagtgacgaggtggagatcatccaaggcctcacgcgcatgcctggcggccgcgacgcactcaaaagcagcgtggacgcggtcaagtactttgggaagggcacctacaccgactgcgctatcaagaaggggctggagcagctcctcgtggggggctcccacctgaaggagaataagtacctgattgtggtgaccgacgggcaccccctggagggctacaaggaaccctgtggggggctggaggatgctgtgaacgaggccaagcacctgggcgtcaaagtcttctcggtggccatcacacccgaccacctggagccgcgtctgagcatcatcgccacggaccacacgtaccggcgcaacttcacggcggctgactggggccagagccgcgacgcagaggaggccatcagccagaccatcgacaccatcgtggacatgatcaaaaataacgttgagcaagtgtgctgctccttcgaatgccagcctgcaagaggacctccgggcctccggggcgaccccggctttgagggagaacgaggcaagccggggctcccaggagagaagggagaagccggagatcctggaagacccggggacctcggacctgttgggtaccagggaatgaagggagaaaaagggagccgtggggagaagggctccaggggaccaaagggctacaagggagagaagggcaagcgtggcatcgacggggtggacggcgtgaagggggagatggggtacccaggcctgccaggctgcaagggctcgccgggttttgacggcattcaaggaccccctggccccaagggagaccccggcgcctttggactgaaaggagaaaagggcgagcctggagctgacggggaggccgggagaccaggagctcggggaccatctggagacgaggggccagccggagagcctgggccccccggagagaaaggagaggcgggcgacgaggggaacccaggacctgacggtgcccccggggagcggggtggccctggagagagaggaccacgggggaccccaggcccgcggggaccaagaggagaccctggtgaagctggcccgcagggtgatcagggaagagaagggcccgttggtgtccctggagacccgggcgaggctggccctatcggacctaaaggctaccgaggcgatgagggtcccccagggtccgagggtgccagaggagccccaggacctgccggaccccctggagacccggggctgatgggagaaaggggagaagacggccccgctggaaatggcaccgagggcttccccggcttccccgggtatcccgggaacaggggcgctcccgggataaacggcacgaagggctaccccggcctcaagggggacgagggagaagccggggaccccggagacgataacaacgacattgcaccccgaggagtcaaaggagcaaaggggtaccggggtcccgagggcccccagggacccccaggacaccaaggaccgcctgggccggacgaatgcgagattttggacatcatcatgaaaatgtgctcttgctgtgaatgcaagtgcggccccatcgacctcctgttcgtgctggacagctcagagagcattggcctgcagaacttcgagattgccaaggacttcgtcgtcaaggtcatcgaccggctgagccgggacgagctggtcaagttcgagccagggcagtcgtacgcgggtgtggtgcagtacagccacagccagatgcaggagcacgtgagcctgcgcagccccagcatccggaacgtgcaggagctcaaggaagccatcaagagcctgcagtggatggcgggcggcaccttcacgggggaggccctgcagtacacgcgggaccagctgctgccgcccagcccgaacaaccgcatcgccctggtcatcactgacgggcgctcagacactcagagggacaccacaccgctcaacgtgctctgcagccccggcatccaggtggtctccgtgggcatcaaagacgtgtttgacttcatcccaggctcagaccagctcaatgtcatttcttgccaaggcctggcaccatcccagggccggcccggcctctcgctggtcaaggagaactatgcagagctgctggaggatgccttcctgaagaatgtcaccgcccagatctgcatagacaagaagtgtccagattacacctgccccatcacgttctcctccccggctgacatcaccatcctgctggacggctccgccagcgtgggcagccacaactttgacaccaccaagcgcttcgccaagcgcctggccgagcgcttcctcacagcgggcaggacggaccccgcccacgacgtgcgggtggcggtggtgcagtacagcggcacgggccagcagcgcccagagcgggcgtcgctgcagttcctgcagaactacacggccctggccagtgccgtcgatgccatggactttatcaacgacgccaccgacgtcaacgatgccctgggctatgtgacccgcttctaccgcgaggcctcgtccggcgctgccaagaagaggctgctgctcttctcagatggcaactcgcagggcgccacgcccgctgccatcgagaaggccgtgcaggaagcccagcgggcaggcatcgagatcttcgtggtggtcgtgggccgccaggtgaatgagccccacatccgcgtcctggtcaccggcaagacggccgagtacgacgtggcctacggcgagagccacctgttccgtgtccccagctaccaggccctgctccgcggtgtcttccaccagacagtctccaggaaggtggcgctgggctagcccaccctgcacgccggcaccaaaccctgtcctcccacccctccccactcatcactaaacagagcccaagcttggaaagccaggacacaacgctgctgcctgctttgtgcagggtcctccggggctcagccctgagttggcatcacctgcgcagggccctctggggctcagctctgagctagtgtcacctgcacagggccctctgaggctcagccctgagctggcgtcacctgtgcagggccctctggggctcagccctgagctggcctcacctgggttccccaccccgggctctcctgccctgccctcctgcccgccctccctcctgcctgcgcagctccttccctaggcacctctgtgctgcatcccaccagcctgagcaagacgcctctcggggcctgtgccgcactagcctccctctcctctgtccccatagctggtttttcccaccaatcctcacctaacagttactttacaattaaactcaaagcaagctcttctcctcagcttggggcagccattggcctctgtctcgttttgggaaaccaaggtcaggaggccgttgcagacataaatctcggcgactcggccccgtctcctgagggtcctgctggtgaccggcctggaccttggccctacagccctggaggccgctgctgaccagcactgaccccgacctcagagagtactcgcaggggcgctggctgcactcaagaccctcgagattaacggtgctaaccccgtctgctcctccctcccgcagagactggggcctggactggacatgagagccccttggtgccacagagggctgtgtcttactagaaacaacgcaaacctctccttcctcagaatagtgatgtgttcgacgttttatcaaaggccccctttctatgttcatgttagttttgctccttctgtgtttttttctgaaccatatccatgttgctgacttttccaaataaaggttttcactcctc

SEQ ID NO: 59 - DNA, 5787 bp, Homo sapiens
atgttacttcctgtatggaggcatggccagtttccagcgccgcgctcttcgttccttcccagcctgcgccggagccacaactttcaggagcatggactgaaggcgccctcgccccagcgcccctctgagatcctttgtgttttcctccgtttcctccggccgtttctattttggggggctctccgctccccctgcctctcccctccccttcccctctcgcaaacatgcctccttccttcccggggccctggaaggagctgcctgcctgaagcccggagacgccgcgccgcgctcagccccgccgccgcccgccggctctcgggctgtgctgcgctgccgactcaagttggggatcctcggctgctcgccgccgccgcccgcggtccctgtctgccccaggcccggggcatcgccgccggccgccgactccgcgccctgcccgatcggctctctcctttttaaacggaaagcagcctttctccgccgagaggatcgtccccagcgtggctctgcgttcccggtcactttttgagattttccggggggcgctcggcggcttcccggattccaaggggactcgggccgccgagcgcggggggcccgtggagcgggcgagccggggaagcgccccggcttagcggaggctcgcacggaggcaagaacttattcaacaagtttacctccctgctttcctcttttcgatgtgcgttttcggacatgcggaggttactggaaccgtgttggtggattttgttcctgaaaatcaccagttccgtgctccattatgtcgtgtgcttccccgcgttgacagaaggctacgttggggccctgcacgagaatagacacggcagcgcagtgcagatccgcaggcgcaaggcttcaggcgacccgtactgggcctactctggtgcctatggtcctgagcactgggtcacgtctagtgtcagctgtgggagccgtcaccagtctcctattgacattttagaccagtatgcgcgtgttggggaagaataccaggaactgcaactcgatggcttcgacaatgagtcttctaacaaaacctggatgaaaaacacagggaaaacagtcgccatccttctgaaagacgactattttgtcagtggagctggtctacctggcagattcaaagctgagaaggtggaatttcactggggccacagcaatggctcagcgggctctgaacacagcatcaatggcaggaggtttcctgttgagatgcagattttcttttacaatccagatgactttgacagctttcaaaccgcaatttctgagaacagaataatcggagccatggccatattttttcaagtcagtccgagggacaattctgcactggatcctattatccacgggttgaagggtgtcgtacatcatgagaaggagacctttctggatcctttcgtcctccgggacctcctgcctgcatccctgggcagctattatcggtacacaggttccttgaccacaccaccgtgtagcgaaatagtggagtggatagtcttccggagacccgtccccatctcttaccatcagcttgaggctttttattccatcttcaccacggagcagcaagaccatgtcaagtcggtggagtatctgagaaataactttcgaccacagcagcgtctgcatgacagggtggtgtccaagtccgccgtccgtgactcctggaaccacgacatgacagacttcttagaaaacccactggggacagaagcctctaaagtttgcagctctccacccatccacatgaaggtgcagcctctgaaccagacggcactgcaggtgtcctggagccagccggagactatctaccacccacccatcatgaactacatgatctcctacagctggaccaagaatgaggacgagaaggagaagacgtttacaaaggacagcgacaaagacttgaaagccaccattagccatgtctcacccgatagcctttacctgttccgagtccaggccgtgtgtcggaacgacatgcgcagcgactttagccagacgatgctgtttcaagctaataccactcgaatattccaagggaccagaatagtgaaaacaggagtgcccacagcgtctcctgcctcttcagccgacatggcccccatcagctcggggtcttctacctggacgtcctctggcatcccattctcatttgtttccatggcaactgggatgggcccctcctccagtggcagccaggccacagtggcctcggtggtcaccagcacgctgctcgccggcctggggttcggcggtggtggcatctcctctttccccagcactgtgtggcccacgcgcctcccgacggccgcctcagccagcaagcaggcggctaggccagtcctagccaccacagaggccttggcttctccagggcccgatggtgattcgtcaccaaccaaggacggcgagggcaccgaggaaggagagaaggatgagaaaagcgagagtgaggatggggagcgggagcacgaggaggatggagagaaggactccgaaaagaaggagaagagtggggtgacccacgctgccgaggagcggaatcagacggagcccagccccacaccctcgtctcctaacaggactgccgagggagggcatcagactatacctgggcatgagcaggatcacactgccgtccccacagaccagacgggcggaaggagggatgccggcccaggcctggaccccgacatggtcacctccacccaagtgccccccaccgccacagaggagcagtatgcagggagtgatcccaagaggcccgaaatgccatctaaaaagcctatgtcccgcggggaccgattttctgaagacagcagatttatcactgttaatccagcggaaaaaaacacctctggaatgataagccgccctgctccagggaggatggagtggatcatccctctgattgtggtatcagccttgaccttcgtgtgcctcatccttctcattgctgtgctcgtttactggagagggtgtaacaaaataaagtccaagggctttcccagacgtttccgtgaagtgccttcttctggggagagaggagagaaggggagcagaaaatgttttcagactgctcatttctatgtggaagacagcagttcacctcgagtggtccctaatgaaagtattcctattattcctattccggatgacatggaagccattcctgtcaaacagtttgtcaaacacatcggtgagctctattctaataaccagcatgggttctctgaggattttgaggaagtccagcgctgtactgctgatatgaacatcactgcagagcattccaatcatccagaaaacaagcacaaaaacagatacatcaacattttagcatatgatcacagtagggtgaagttaagacctttaccaggaaaagactctaagcacagcgactacattaatgcaaactatgttgatggttacaacaaagcaaaagcctacattgccacccaaggacctttgaagtctacatttgaagatttctggaggatgatttgggaacaaaacactggaatcattgtgatgattacgaaccttgtggaaaaaggaagacgaaaatgtgatcagtattggccaacagagaacagtgaggaatatggaaacattattgtcacgctgaagagcacaaaaatacatgcctgctacactgttcgtcgtttttcaatcagaaatacaaaagtgaaaaagggtcagaagggaaatcccaagggtcgtcagaatgaaagggtagtgatccagtatcactatacacagtggcctgacatgggagttcccgagtatgcccttccagtactgactttcgtgaggagatcctcagcagctcggatgccagaaacgggccctgtgttggtgcactgcagtgctggtgtgggcagaacaggcacctatattgtaatagacagcatgctgcaacagataaaagacaaaagcacagttaacgtcctgggattcctgaagcatatcaggacacagcgtaactacctcgtccagactgaggagcagtacattttcatccatgatgccttgttggaagccattcttggaaaggagactgaagtatcttcaaatcagctgcacagctatgttaacagcatccttataccaggagtaggaggaaagacacgactggaaaagcaattcaagctggtcacacagtgtaatgcaaaatatgtggaatgtttcagtgctcagaaagagtgtaacaaagaaaagaacagaaactcttcagttgtgccatctgagcgtgctcgagtgggtcttgcaccattgcctggaatgaaaggaacagattacattaatgcttcttatatcatgggctattataggagcaatgaatttattataactcagcatcctctgccacatactacgaaagatttctggcgaatgatttgggatcataacgcacagatcattgtcatgctgccagacaaccagagcttggcagaagatgagtttgtgtactggccaagtcgagaagaatccatgaactgtgaggcctttaccgtcacccttatcagcaaagacagactgtgcctctctaatgaagaacaaattatcatccatgactttatccttgaagctacacaggatgactatgtcttagaagttcggcactttcagtgtcccaaatggcctaacccagatgcccccataagtagtacctttgaacttatcaacgtcatcaaggaagaggccttaacaagggatggtcccaccattgttcatgatgagtatggagcagtttcagcaggaatgttatgtgcccttaccaccctgtcccagcaactggagaatgaaaatgctgtggatgttttccaggttgcaaaaatgatcaatcttatgaggcctggagtattcacagacattgaacaataccagttcatctataaagcaaggcttagcttggtcagcactaaagaaaatggaaatggtcccatgacagtagacaaaaatggtgctgttcttattgcagatgaatcagaccctgctgagagcatggagtccctagtgtgactggaatcctgaaagggcacttaatttgtaaacttctgaagactgagaacttttttgaggccttttttgccagactctaggttatacaataacccagttacttttttacactgataaaagttttgatatttattttttgccattttatgtcttaatggtatcctactgagcatttgcacctctgttcatttcacacagtgaaacgcaattttacctagtttgcactatatgatcagtgttactgcctataatcttatacaacagcaaaccctgatgtgacattccatgacgacatacatgctacttttttttagttcaatacagtgaaggtctttgttatgacagtgaatattgcttttattattattattgctgaagtggttgcattctactagcaggcaatgctgtacttttcttcagtcctcctctcctttttattttaggcactgttcaatactgtatgccttctgtattttaatggagtggatagcattgttttcttttacagactagcaggctactgggacctaaaaaggtctgttaatgtcatggccttgaaacagttccatttatgctggttaagagatcccttaagaagttagaaggcttaagaactgcttcatgtgaacatcccttattagttacaaagttatattcacagttttttaaaaatgtgtcaaaataaaggataactctgtattacagctttcccagtaaaaaaaaaaaaaaaaa

SEQ ID NO: 60 - DNA, 624 bp, Homo sapiens
ggcgggccgctcccacttcggcacgaggggcacgaggtaaatcttttctgcttactgaaaaggaagagtctgatgattagttactgatcctctttgcatttgtaaagctttggagatattgaatcatgttaccatttctgtttttttccaccctgttttcttccatatttactgaagctcagaagcagtattgggtctgcaactcatccgatgcaagtatttcatacacctactgtgataaaatgcaatacccaatttcaattaatgttaacccctgtatagaattgaaaggatccaaaggattattgcacattttctacattccaaggagagatttaaagcaattatatttcaatctctatataactgtcaacaccatgaatcttccaaagcgcaaagaagttatttgccgaggatctgatgacgattactctttttgcagagctctgaagggagagactgtgaatacaacaatatcattctccttcaagggaataaaattttctaagggaaaatacaaatgtgttgttgaagctatttctgggagcccagaagaaatgctcttttgcttggagtttgtcatcctacaccaacctaattcaaattagaataaattgagtattt

SEQ ID NO: 61 - DNA, 1843 bp, Homo sapiens
ataaaaaccgtcctcgggcgcggcggggagaagccgagctgagcggatcctcacacgactgtgatccgattctttccagcggcttctgcaaccaagcgggtcttacccccggtcctccgcgtctccagtcctcgcacctggaaccccaacgtccccgagagtccccgaatccccgctcccaggctacctaagaggatgagcggtgctccgacggccggggcagccctgatgctctgcgccgccaccgccgtgctactgagcgctcagggcggacccgtgcagtccaagtcgccgcgctttgcgtcctgggacgagatgaatgtcctggcgcacggactcctgcagctcggccaggggctgcgcgaacacgcggagcgcacccgcagtcagctgagcgcgctggagcggcgcctgagcgcgtgcgggtccgcctgtcagggaaccgaggggtccaccgacctcccgttagcccctgagagccgggtggaccctgaggtccttcacagcctgcagacacaactcaaggctcagaacagcaggatccagcaactcttccacaaggtggcccagcagcagcggcacctggagaagcagcacctgcgaattcagcatctgcaaagccagtttggcctcctggaccacaagcacctagaccatgaggtggccaagcctgcccgaagaaagaggctgcccgagatggcccagccagttgacccggctcacaatgtcagccgcctgcaccggctgcccagggattgccaggagctgttccaggttggggagaggcagagtggactatttgaaatccagcctcaggggtctccgccatttttggtgaactgcaagatgacctcagatggaggctggacagtaattcagaggcgccacgatggctcagtggacttcaaccggccctgggaagcctacaaggcggggtttggggatccccacggcgagttctggctgggtctggagaaggtgcatagcatcacgggggaccgcaacagccgcctggccgtgcagctgcgggactgggatggcaacgccgagttgctgcagttctccgtgcacctgggtggcgaggacacggcctatagcctgcagctcactgcacccgtggccggccagctgggcgccaccaccgtcccacccagcggcctctccgtacccttctccacttgggaccaggatcacgacctccgcagggacaagaactgcgccaagagcctctctggaggctggtggtttggcacctgcagccattccaacctcaacggccagtacttccgctccatcccacagcagcggcagaagcttaagaagggaatcttctggaagacctggcggggccgctactacccgctgcaggccaccaccatgttgatccagcccatggcagcagaggcagcctcctagcgtcctggctgggcctggtcccaggcccacgaaagacggtgactcttggctctgcccgaggatgtggccaagaccacgactggagaagccccctttctgagtgcaggggggctgcatgcgttgcctcctgagatcgaggctgcaggatatgctcagactctagaggcgtggaccaaggggcatggagcttcactccttgctggccagggagttggggactcagagggaccacttggggccagccagactggcctcaatggcggactcagtcacattgactgacggggaccagggcttgtgtgggtcgagagcgccctcatggtgctggtgctgttgtgtgtaggtcccctggggacacaagcaggcgccaatggtatctgggcggagctcacagagttcttggaataaaagcaacctcagaacactt

SEQ ID NO: 62 - DNA, 3091 bp, Homo sapiens
gggagacccaagcttctagagatccctcgacctcgagatccattgtgctctaaagagcggaccccagcctctgccaggttcggtccgccatcctcgtcccgtcctccgccggcccctgccccgcgcccagggatcctccagctcctttcgcccgcgccctccgttcgctccggacaccatggacaagttttggtggcacgcagcctggggactctgcctcgtgccgctgagcctggcgcagatcgatttgaatataacctgccgctttgcaggtgtattccacgtggagaaaaatggtcgctacagcatctctcggacggaggccgctgacctctgcaaggctttcaatagcaccttgcccacaatggcccagatggagaaagctctgagcatcggatttgagacctgcaggtatgggttcatagaagggcatgtggtgattccccggatccaccccaactccatctgtgcagcaaacaacacaggggtgtacatcctcacatacaacacctcccagtatgacacatattgcttcaatgcttcagctccacctgaagaagattgtacatcagtcacagacctgcccaatgcctttgatggaccaattaccataactattgttaaccgtgatggcacccgctatgtccagaaaggagaatacagaacgaatcctgaagacatctaccccagcaaccctactgatgatgacgtgagcagcggctcctccagtgaaaggagcagcacttcaggaggttacatcttttacaccttttctactgtacaccccatcccagacgaagacagtccctggatcaccgacagcacagacagaatccctgctaccactttgatgagcactagtgctacagcaactgagacagcaaccaagaggcaagaagcctgggattggttttcatggttgtttctaccatcagagtcaaagaatcatcttcacacaacaacacaaatggctggtacgtcttcaaataccatctcagcaggctgggagccaaatgaagaaaatgaagatgaaagagacagacacctcagtttttctggatcaggcattgatgatgatgaagattttatctccagcaccatttcaaccacaccacgggcctttgaccacacaaaacagaaccaggactggacccagtggaacccaagccattcaaatccggaagtgctacttcagacaaccacaaggatgactgatgtagacagaaatggcaccactgcttatgaaggaaactggaacccagaagcacaccctcccctcattcaccatgagcatcatgaggaagaagagaccccacattctacaagcacaatccaggcaactcctagtagtacaacggaagaaacagctacccagaaggaacagtggtttggcaacagatggcatgagggatatcgccaaacacccagagaagactcccattcgacaacagggacagctgcagcctcagctcataccagccatccaatgcaaggaaggacaacaccaagcccagaggacagttcctggactgatttcttcaacccaatctcacaccccatgggacgaggtcatcaagcaggaagaaggatggatatggactccagtcatagtacaacgcttcagcctactgcaaatccaaacacaggtttggtggaaaatttggacaggacaggacctctttcaatgacaacgcagcagagtaattctcagagcttctctacatcacatgaaggcttggaagaagataaagaccatccaacaacttctactctgacatcaagcaataggaatgatgtcacaggtggaagaagagacccaaatcattctgaaggctcaactactttactggaaggttatacctctcattacccacacacgaaggaaagcaggaccttcatcccagtgacctcagctaagactgggtcctttggagttactgcagttactgttggagattccaactctaatgtcaatcgttccttatcaggagaccaagacacattccaccccagtggggggtcccataccactcatggatctgaatcagatggacactcacatgggagtcaagaaggtggagcaaacacaacctctggtcctataaggacaccccaaattccagaatggctgatcatcttggcatccctcttggccttggctttgattcttgcagtttgcattgcagtcaacagtcgaagaaggtgtgggcagaagaaaaagctagtgatcaacagtggcaatggagctgtggaggacagaaagccaagtggactcaacggagaggccagcaagtctcaggaaatggtgcatttggtgaacaaggagtcgtcagaaactccagaccagtttatgacagctgatgagacaaggaacctgcagaatgtggacatgaagattggggtgtaacacctacaccattatcttggaaagaaacaaccgttggaaacataaccattacagggagctgggacacttaacagatgcaatgtgctactgattgtttcattgcgaatcttttttagcataaaattttctactctttttgttttttgtgttttgttctttaaagtcaggtccaatttgtaaaaacagcattgctttgtaaattagggcccaattaataatcagcaagaatttgatcgttcagttccacttggaggccttcatcctcgggtgtgctatggatggcttctaacaaaaactacacatatgtattcctgatcgccaacctttcccccaccagctaaggacatttcccagggttaatagggcctggtccctgggaggaaatttgaatgggtccattttgcccttccatagcctaatccctgggcattgctttccactgaggttggggtgtactagttacacatcttcaacagaccccctctagaaatttttcagatgcttctgggagacaccaaagggtgaagctatttatctgtagtaaactatttatctgtgtttttgaaatattaaaccctggatcagtcctttgatcagtataattttttaaagttactttgtcagaggcacaaaagggtttaaactgattcataataaatatctgtacttcttcgatcttcaaaa

SEQ ID NO: 63 - DNA, 2870 bp, Homo sapiens
aggtcgcaggcgggcgtgcgtggagcgggggccgcggccgcgccgcagagatgtgactcgggccgaaggccagctggagcgtcggcgctgcggggccgcgggggtcgaatgttcgtggcatcagagagaaagatgagagctcaccaggtgctcaccttcctcctgctcttcgtgatcacctcggtggcctctgaaaacgccagcacatcccgaggctgtgggctggacctcctccctcagtacgtgtccctgtgcgacctggacgccatctggggcattgtggtggaggcggtggccggggcgggcgccctgatcacactgctcctgatgctcatcctcctggtgcggctgcccttcatcaaggagaaggagaagaagagccctgtgggcctccactttctgttcctcctggggaccctgggcctctttgggctgacgtttgccttcatcatccaggaggacgagaccatctgctctgtccgccgcttcctctggggcgtcctctttgcgctctgcttctcctgcctgctgagccaggcatggcgcgtgcggaggctggtgcggcatggcacgggccccgcgggctggcagctggtgggcctggcgctgtgcctgatgctggtgcaagtcatcatcgctgtggagtggctggtgctcaccgtgctgcgtgacacaaggccagcctgcgcctacgagcccatggactttgtgatggccctcatctacgacatggtactgcttgtggtcaccctggggctggccctcttcactctgtgcggcaagttcaagaggtggaagctgaacggggccttcctcctcatcacagccttcctctctgtgctcatctgggtggcctggatgaccatgtacctcttcggcaatgtcaagctgcagcagggggatgcctggaacgaccccaccttggccatcacgctggcggccagcggctgggtcttcgtcatcttccacgccatccctgagatccactgcacccttctgccagccctgcaggagaacacgcccaactacttcgacacgtcgcagcccaggatgcgggagacggccttcgaggaggacgtgcagctgccgcgggcctatatggagaacaaggccttctccatggatgaacacaatgcagctctccgaacagcaggatttcccaacggcagcttgggaaaaagacccagtggcagcttggggaaaagacccagcgctccgtttagaagcaacgtgtatcagccaactgagatggccgtcgtgctcaacggtgggaccatcccaactgctccgccaagtcacacaggaagacacctttggtgaaagactttaagttccagagaatcagaatttctcttaccgatttgcctccctggctgtgtctttcttgagggagaaatcggtaacagttgccgaaccaggccgcctcacagccaggaaatttggaaatcctagccaaggggatttcgtgtaaatgtgaacactgacgaactgaaaagctaacaccgactgcccgcccctcccctgccacacacacagacacgtaataccagaccaacctcaatccccgcaaactaaagcaaagctaattgcaaatagtattaggctcactggaaaatgtggctgggaagactgtttcatcctctgggggtagaacagaaccaaattcacagctggtgggccagactggtgttggttggaggtggggggctcccactcttatcacctctccccagcaagtgctggaccccaggtagcctcttggagatgaccgttgcgttgaggacaaatggggactttgccaccggcttgcctggtggtttgcacatttcaggggggtcaggagagttaaggaggttgtgggtgggattccaaggtgaggcccaactgaatcgtggggtgagctttatagccagtagaggtggagggaccctggcatgtgccaaagaagaggccctctgggtgatgaagtgaccatcacatttggaaagtgatcaaccactgttccttctatggggctcttgctctaatgtctatggtgagaacacaggccccgccccttcccttgtagagccatagaaatattctggcttggggcagcagtcccttcttcccttgatcatctcgccctgttcctacacttacgggtgtatctccaaatcctctcccaattttattcccttattcatttcaagagctccaatggggtctccagctgaaagcccctccgggaggcaggttggaaggcaggcaccacggcaggttttccgcgatgatgtcacctagcagggcttcaggggttcccactaggatgcagagatgacctctcgctgcctcacaagcagtgacacctcgggtcctttccgttgctatggtgaaaattcctggatggaatggatcacatgagggtttcttgttgcttttggagggtgtgggggatattttgttttggtttttctgcaggttccatgaaaacagcccttttccaagcccattgtttctgtcatggtttccatctgtcctgagcaagtcattcctttgttatttagcatttcgaacatctcggccattcaaagcccccatgttctctgcactgtttggccagcataacctctagcatcgattcaaagcagagttttaacctgacggcatggaatgtataaatgagggtgggtccttctgcagatactctaatcactacattgctttttctataaaactacccataagcctttaacctttaaagaaaaatgaaaaaggttagtgtttgggggccgggggaggactgaccgcttcataagccagtacgtctgagctgagtatgtttcaataaaccttttgatatttctcaaaaaaaaaaaaaaaaaaaaaaa

SEQ ID NO: 64 - DNA, 615 bp, Homo sapiens
gaaaatgatattaattttattgcatcattttactgactagaacgccagacttagagtggatataagtataaaaataaccaaattcttacaaataatactttgctgctacagtactgaataattagtggaggttgcaattataatacaactttaaataacattctcataatgggtttaacacaatcaaccaggggctaaggtttaaaggtttacaaagagaaatccaggacaacatgaaaactcccaaagttcatattccagctaaatgcttcatttaaccgtcaatccaccaacacaaacattaacaaaactcagagcaactcatgatgaaacagtcgttctctttttaggacaggccaaggttaatacagaaaggtaaatgattcggattagtttcccaggcagaactgattccatcccatccctggcctatcccatcctccctacccaagaaatctgtaatgaagtatgttaagtgcattttaaaaatctgaatatgcaaattcttcaaaatgtcctctttgaaaatgcccaggtgacagacccagtctcggacctgtcgctttttagacctgaatggtccccctttggtttcatagggttttctgtgagcag

SEQ ID NO: 65 - DNA, 913 bp, Homo sapiens
ctggcctccgtctggtctccctccctcctactagggtggtcaagctgtgagatctcttccagcctccaaatccagctttcccattttactgatgagaaaatcaaggccacattgcagctgggtggggagtggagcgtgacaggcacgggagaggacagcgattgttgactctagttcctgatgtttaatcagaaaaaccacttttcctgtagagcacatttcctaaaaggctgctgctgtgtagggaggtgtggccttttcctggtgcagtgtgaaggagggaagtgacgggcagtcgtgaactgtctgggacagatagcacaagtcagagtttgagcaaaactagggtgttaccggcgctatgttgaaattgtctggaggcgggctttcccagcgagtctccattcagcatctggaaaaagtgtaaccagaatggaggtgtctgactctcctgtgctctctcagcgccgagctctagctgcaggctgcctgggtggccttctcacaccctcccgtgcaggagactgcatttctctttcccacagcccagcagatagctcattggcttagcaatgggcacttaacagaatcagttgttgcagccagaattaaatgcacagtctggctttaaaccaactgtaactcatccctggggtgaaggtgggtcgggaattagaccagagtgtgtgttgcccaaggccatgctgcgtcgcggaatggggccctggtctggccggcggcagggtcctcagccctgttccgccagttttctttgggccgagtgctgggaaggcccttcgcgggcagggcctcttgtgcccctgttctctccaggggggggcgccgtggccccccggtcccggggttgggagctccccccgagagggagtctcggggggaaaatctcccttgg

SEQ ID NO: 66 - DNA, 2060 bp, Homo sapiens
tgttcccagcactcaagccttgccaccgccgagccgggcttcctgggtgtttcaggcaaggaagtctaggtccctggggggtgacccccaaggaaaaggcagcctccctgcgcacccggttgcccggagccctctccagggccggctgggctgggggttgccctggccagcaggggcccgggggcgatgccacccggtgccgactgaggccaccgcaccatggcccgctcgctgacctggcgctgctgcccctggtgcctgacggaggatgagaaggccgccgcccgggtggaccaggagatcaacaggatcctcttggagcagaagaagcaggaccgcggggagctgaagctgctgcttttgggcccaggcgagagcgggaagagcaccttcatcaagcagatgcggatcatccacggcgccggctactcggaggaggagcgcaagggcttccggcccctggtctaccagaacatcttcgtgtccatgcgggccatgatcgaggccatggagcggctgcagattccattcagcaggcccgagagcaagcaccacgctagcctggtcatgagccaggacccctataaagtgaccacgtttgagaagcgctacgctgcggccatgcagtggctgtggagggatgccggcatccgggcctgctatgagcgtcggcgggaattccacctgctcgattcagccgtgtactacctgtcccacctggagcgcatcaccgaggagggctacgtccccacagctcaggacgtgctccgcagccgcatgcccaccactggcatcaacgagtactgcttctccgtgcagaaaaccaacctgcggatcgtggacgtcgggggccagaagtcagagcgtaagaaatggatccattgtttcgagaacgtgatcgccctcatctacctggcctcactgagtgaatacgaccagtgcctggaggagaacaaccaggagaaccgcatgaaggagagcctcgcattgtttgggactatcctggaactaccctggttcaaaagcacatccgtcatcctctttctcaacaaaaccgacatcctggaggagaaaatccccacctcccacctggctacctatttccccagtttccagggccctaagcaggatgctgaggcagccaagaggttcatcctggacatgtacacgaggatgtacaccgggtgcgtggacggccccgagggcagcaagaagggcgcacgatcccgacgccttttcagccactacacatgtgccacagacacacagaacatccgcaaggtcttcaaggacgtgcgggactcggtgctcgcccgctacctggacgagatcaacctgctgtgacccaggccccacctggggcaggcggcaccggcgggcgggtgggaggtgggagtggctgcagggaccctagtgtcctggtctatctctccagcctcggcccacacgcaagggagtcgggggacggcccgctgctggccgctctcttctctgcctctcaccaggacagccgccccccagggtactcctgcccttgcttgactcagtttccctcctttgaaagggaaggagcaaaacggccatttgggatgccagggtggatgaaaaggtgaagaaatcaggggattgagacttgggtgggtgggcatctctcaggagccccatctccgggcgtgtcacctcctgggcagggttctgggaccctctgtgggtgacgcacaccctgggatggggctagtagagccttcaggcgccttcgggcgtggactctggcgcactctagtggacaggagaaggaacgccttccaggaacctgtggactaggggtgcagggacttccctttgcaaggggtaacagaccgctggaaaacactgtcactttcagagctcggtggctcacagcgtgtcctgccccggtttgcggacgagagaaatcgcggcccacaagcatcccccatcccttgcaggctgggggctgggcatgctgcatcttaaccttttgtatttattccctcaccttctgcagggctccgtgcgggctgaaattaaagatttcttag

SEQ ID NO: 67 - DNA, 610 bp, Homo sapiens
tttcttcttattattatttattgctgttgttatcccctctgttcctgctacaggaaattctttccatgtaaaattcattcttgtccccaggcctagttcacagccatactgaatgcaattcagcatgtattcaccatgctctgttagttgtgtccagatgttgcatgacgggggagcacactcacattgtgtctgtgtgactcatgtccctggagttatgcagcgcacagcctacatggctgtacagggcagatctgattggatctcctaaagagcaggagtgagctgccttctttgtacctgcgcctgctctgttgctgccagttgatggtgcctgtcagctggtgggcagccctggagtgtggatggaagaacaggcatgcacctggttttattgaggccaggggagagctggtgtgggagcctcaggccccagagagccctcgggacctcctgatggacagccagactccaaagctatgagaagtacagaaagcccacagttggtttccggtcctgggactctaacctgtgcttggttgactctgcaggtctctgatgagggggcagctgctccctggtggggctcctctggggacaggcagcttcc

SEQ ID NO: 68 - DNA, 1053 bp, Homo sapiens
gttgcaggcagacggagcagagcggtcagggatcatgagggagagtgcgttggagccggggcctgtgcccgaggcgccggcggggggtcccgtgcacgccgtgacggtggtgaccctgctggagaagctggcctccatgctggagactctgcgggagcggcagggaggcctggctcgaaggcagggaggcctggcagggtccgtgcgccgcatccagagcggcctgggcgctctgagtcgcagccacgacaccaccagcaacaccttggcgcagctgctggccaaggcggagcgcgtgagctcgcacgccaacgccgcccaagagcgcgcggtgcgccgcgcagcccaggtgcagcggctggaggccaaccacgggctgctggtggcgcgcgggaagctccacgttctgctcttcaaggaggagggtgaagtcccagccagcgctttccagaaggcaccagagcccttgggcccggcggaccagtccgagctgggcccagagcagctggaggccgaagttggagagagctcggacgaggagccggtggagtccagggcccagcggctgcggcgcaccggattgcagaaggtacagagcctccgaagggccctttcgggccggaaaggccctgcagcgccaccgcccaccccggtcaagccgcctcgccttgggcctggccggagcgctgaagcccagccggaagcccagcctgcgctggagcccacgctggagccagagcctccgcaggacaccgaggaagatcccgggagacctggggctgccgaagaagctctgctccaaatggagagtgtagcctgagggctggtgttgcctgcctcccctgtgcttgtgccttgtcccaaaataaatcctttcagaatgtagcactcacgccctaataaggagcgaatcctacatccaccaaggcgggcgctctggccctcccttccttaagcccagtcctgtgtcctctgaaagaggtgcagtcactcacacctgcttgcgctcaccatcaataaaagtaatttcacccgaaaaaaaaaaaaaaaaaa

SEQ ID NO: 69 - DNA, 4459 bp, Homo sapiens
ctctcagtgtctccaactttgcgctggaagaaaaacttcccgcgcgccggcagaactgcagcgcctccttttagtgactccgggagcttcggctgtagccggctctgcgcgcccttccaacgaataatagaaattgttaattttaacaatccagagcaggccaacgaggctttgctctcccgacccgaactaaagctccctcgctccgtgcgctgctacgagcggtgtctcctggggctccaatgcagcgagctgtgcccgaggggttcggaaggcgcaagctgggcagcgacatggggaacgcggagcgggctccggggtctcggagctttgggcccgtacccacgctgctgctgctcgccgcggcgctactggccgtgtcggacgcactcgggcgcccctccgaggaggacgaggagctagtggtgccggagctggagcgcgccccgggacacgggaccacgcgcctccgcctgcacgcctttgaccagcagctggatctggagctgcggcccgacagcagctttttggcgcccggcttcacgctccagaacgtggggcgcaaatccgggtccgagacgccgcttccggaaaccgacctggcgcactgcttctactccggcaccgtgaatggcgatcccagctcggctgccgccctcagcctctgcgagggcgtgcgcggcgccttctacctgctgggggaggcgtatttcatccagccgctgcccgccgccagcgagcgcctcgccaccgccgccccaggggagaagccgccggcaccactacagttccacctcctgcggcggaatcggcagggcgacgtcggcggcacgtgcggggtcgtggacgacgagccccggccgactgggaaagcggagaccgaagacgaggacgaagggactgagggcgaggacgaaggggctcagtggtcgccgcaggacccggcactgcaaggcgtaggacagcccacaggaactggaagcataagaaagaagcgatttgtgtccagtcaccgctatgtggaaaccatgcttgtggcagaccagtcgatggcagaattccacggcagtggtctaaagcattaccttctcacgttgttttcggtggcagccagattgtacaaacaccccagcattcgtaattcagttagcctggtggtggtgaagatcttggtcatccacgatgaacagaaggggccggaagtgacctccaatgctgccctcactctgcggaacttttgcaactggcagaagcagcacaacccacccagtgaccgggatgcagagcactatgacacagcaattcttttcaccagacaggacttgtgtgggtcccagacatgtgatactcttgggatggctgatgttggaactgtgtgtgatccgagcagaagctgctccgtcatagaagatgatggtttacaagctgccttcaccacagcccatgaattaggccacgtgtttaacatgccacatgatgatgcaaagcagtgtgccagccttaatggtgtgaaccaggattcccacatgatggcgtcaatgctttccaacctggaccacagccagccttggtctccttgcagtgcctacatgattacatcatttctggataatggtcatggggaatgtttgatggacaagcctcagaatcccatacagctcccaggcgatctccctggcacctcgtacgatgccaaccggcagtgccagtttacatttggggaggactccaaacactgccccgatgcagccagcacatgtagcaccttgtggtgtaccggcacctctggtggggtgctggtgtgtcaaaccaaacacttcccgtgggcggatggcaccagctgtggagaagggaaatggtgtatcaacggcaagtgtgtgaacaaaaccgacagaaagcattttgatacgccttttcatggaagctggggaatgtgggggccttggggagactgttcgagaacgtgcggtggaggagtccagtacacgatgagggaatgtgacaacccagtcccaaagaatggagggaagtactgtgaaggcaaacgagtgcgctacagatcctgtaaccttgaggactgtccagacaataatggaaaaacctttagagaggaacaatgtgaagcacacaacgagttttcaaaagcttcctttgggagtgggcctgcggtggaatggattcccaagtacgctggcgtctcaccaaaggacaggtgcaagctcatctgccaagccaaaggcattggctacttcttcgttttgcagcccaaggttgtagatggtactccatgtagcccagattccacctctgtctgtgtgcaaggacagtgtgtaaaagctggttgtgatcgcatcatagactccaaaaagaagtttgataaatgtggtgtttgcgggggaaatggatctacttgtaaaaaaatatcaggatcagttactagtgcaaaacctggatatcatgatatcatcacaattccaactggagccaccaacatcgaagtgaaacagcggaaccagaggggatccaggaacaatggcagctttcttgccatcaaagctgctgatggcacatatattcttaatggtgactacactttgtccaccttagagcaagacattatgtacaaaggtgttgtcttgaggtacagcggctcctctgcggcattggaaagaattcgcagctttagccctctcaaagagcccttgaccatccaggttcttactgtgggcaatgcccttcgacctaaaattaaatacacctacttcgtaaagaagaagaaggaatctttcaatgctatccccactttttcagcatgggtcattgaagagtggggcgaatgttctaagtcatgtgaattgggttggcagagaagactggtagaatgccgagacattaatggacagcctgcttccgagtgtgcaaaggaagtgaagccagccagcaccagaccttgtgcagaccatccctgcccccagtggcagctgggggagtggtcatcatgttctaagacctgtgggaagggttacaaaaaaagaagcttgaagtgtctgtcccatgatggaggggtgttatctcatgagagctgtgatcctttaaagaaacctaaacatttcatagacttttgcacaatggcagaatgcagttaagtggtttaagtggtgttagctttgagggcaaggcaaagtgaggaagggctggtgcagggaaagcaagaaggctggagggatccagcgtatcttgccagtaaccagtgaggtgtatcagtaaggtgggattatgggggtagatagaaaaggagttgaatcatcagagtaaactgccagttgcaaatttgataggatagttagtgaggattattaacctctgagcagtgatatagcataataaagccccgggcattattattattatttcttttgttacatctattacaagtttagaaaaaacaaagcaattgtcaaaaaaagttagaactattacaacccctgtttcctggtacttatcaaataacttagtatcatgggggttgggaaatgaaaagtaggagaaaagtgagattttactaagacctgttttactttaccttcactaacaatggggggagaaaggagtacaaataggatctttgaccagcactgtttatggctgctatggtttcagagaatgtttatacattatttctaccgagaattaaaacttcagattgttcaacatgagagaaaggctcagcaacgtgaaataacgcaaatggcttcctctttccttttttggaccatctcagtctttatttgtgtaattcattttgaggaaaaaacaactccatgtatttattcaagtgcattaaagtctacaatggaaaaaaagcagtgaagcattagatgctggtaaaagctagaggagacacaatgagcttagtacctccaacttcctttctttcctaccatgtaaccctgctttgggaatatggatgtaaagaagtaacttgtgtctcatgaaaatcagtacaatcacacaaggaggatgaaacgccggaacaaaaatgaggtgtgtagaacagggtcccacaggtttggggacattgagatcacttgtcttgtggtggggaggctgctgaggggtagcaggtccatctccagcagctggtccaacagtcgtatcctggtgaatgtctgttcagctcttctgtgagaatatgattttttccatatgtatatagtaaaatatgttactataaattacatgtactttataagtattggtttgggtgttccttccaagaaggactatagttagtaataaatgcctataataacatatttatttttatacatttatttctaatgaaaaaaacttttaaattatatcgcttttgtggaagtgcatataaaatagagtatttatacaatatatgttactagaaataaaagaacacttttggaaaaaaaaaaaaaaaaaaaaa

SEQ ID NO: 70 - DNA, 3579 bp, Homo sapiens
ctgaggcccacgcagggcctagggtgggaagatggcaggtgggggcggcgacctgagcaccaggaggctgaatgaatgtatttcaccagtagcaaatgagatgaaccatcttcctgcacacagccacgatttgcaaaggatgttcacggaagaccagggtgtagatgacaggctgctctatgacattgtattcaagcacttcaaaagaaataaggtggagatttcaaatgcaataaaaaagacatttccattcctcgagggcctccgtgatcgtgatctcatcacaaataaaatgtttgaagattctcaagattcttgtagaaacctggtccctgtacagagagtggtgtacaatgttcttagtgaactggagaagacatttaacctgccagttctggaagcactgttcagcgatgtcaacatgcaggaataccccgatttaattcacatttataaaggctttgaaaatgtaatccatgacaaattgcctctccaagaaagtgaagaagaagagagggaggagaggtctggcctccaactaagtcttgaacaaggaactggtgaaaactcttttcgaagcctgacttggccaccttcgggttccccatctcatgctggtacaaccccacctgaaaatggactctcagagcacccctgtgaaacagaacagataaatgcaaagagaaaagatacaaccagtgacaaagatgattcgctaggaagccaacaaacaaatgaacaatgtgctcaaaaggctgagccaacagagtcctgcgaacaaattgctgtccaagtgaataatggggatgctggaagggagatgccctgcccgttgccctgtgatgaagaaagcccagaggcagagctacacaaccatggaatccaaattaattcctgttctgtgcgactggtggatataaaaaaggaaaagccattttctaattcaaaagttgagtgccaagcccaagcaagaactcatcataaccaggcatctgacataatagtcatcagcagtgaggactctgaaggatccactgacgttgatgagcccttagaagtcttcatctcagcaccgagaagtgagcctgtgatcaataatgacaaccctttagaatcaaatgatgaaaaggagggccaagaagccacttgctcacgaccccagattgtaccagagcccatggatttcagaaaattatctacattcagagaaagttttaagaaaagagtgataggacaagaccacgacttttcagaatccagtgaggaggaggcgcccgcagaagcctcaagcggggcactgagaagcaagcatggtgagaaggctcctatgacttctagaagtacatctacttggagaatacccagcaggaagagacgtttcagcagtagtgacttttcagacctgagtaatggagaagagcttcaggaaacctgcagctcatccctaagaagagggtcaggatcacagccacaagaacctgaaaataagaagtgctcctgtgtcatgtgttttccaaaaggtgtgccaagaagccaagaagcaaggactgaaagtagtcaagcatctgacatgatggataccatggatgttgaaaacaattctactttggaaaaacacagtgggaaaagaagaaaaaagagaaggcatagatctaaagtaaatggtctccaaagagggagaaagaaagacagacctagaaaacatttaactctgaataacaaagtccaaaagaaaagatggcaacaaagaggaagaaaagccaacactagacctttgaaaagaagaagaaaaagaggtccaagaattcccaaagatgaaaatattaattttaaacaatctgaacttcctgtgacctgtggtgaggtgaagggcactctatataaggagcgattcaaacaaggaacctcaaagaagtgtatacagagtgaggataaaaagtggttcactcccagggaatttgaaattgaaggagaccgcggagcatccaagaactggaagctaagtatacgctgcggtggatataccctgaaagtcctgatggagaacaaatttctgccagaaccaccaagcacaagaaaaaagagaatactggaatctcacaacaataccttagttgacccttgtgaggagcataagaagaagaacccagatgcttcagtcaagttctcagagtttttaaagaagtgctcagagacatggaagaccatttttgctaaagagaaaggaaaatttgaagatatggcaaaggcggacaaggcccattatgaaagagaaatgaaaacctatatccctcctaaaggggagaaaaaaaagaagttcaaggatcccaatgcacccaagaggcctcctttggcctttttcctgttctgctctgagtatcgcccaaaaatcaaaggagaacatcctggcctgtccattgatgatgttgtgaagaaactggcagggatgtggaataacaccgctgcagctgacaagcagttttatgaaaagaaggctgcaaagctgaaggaaaaatacaaaaaggatattgctgcatatcgagctaaaggaaagcctaattcagcaaaaaagagagttgtcaaggctgaaaaaagcaagaaaaagaaggaagaggaagaagatgaagaggatgaacaagaggaggaaaatgaagaagatgatgataaataagttgcttctagtgcagtttttttcttgtctataaagcatttaagctgcctgtacacaactcactccttttaaagaaaaaaacttcaacgtaagactgtgtaagatttgtttttaaaccgtacactgtgtttttttgtatagttaaccactaccgaatgtgtcttcagatagccctgtcctggtggtatttagccactaacctttgcctggtacagtatgggggttgtaaattggcatggaaatttaaagcaggttcttgttagtgcacagcacaaattagttgtataggaggatggtagttttttcaccttcagttgtctctgatgtagcttatacaaaacatttgttgttctgttaactgaatgccactctgtaattgcaaaaaaaaaaaacagttgcagctgttttgttgacattctgaatgcttctaagtaaatacaatttttaaaaaaccgtatgagggaactgtgtagacaaggtaccaggtcagtcttcttccatgttctattagctccacaaagccaatctcaatccctcaaaacaatcttgtcatacttgaaaatatgacactctagtcaaagccttggtaaaataatcagtgtttccaatctgtcctgttacaaaagaaacagattattattgaacttatgcaaataaccattgtcataagaatgtttatgaatagtttccaaattatggcaaattcatgtagagagagaaaagtaactgttttggttttgctcacaaaagtctactttacctaagggctgtcagatataagtaacttaaaagaaagagaagttttcttgacttttgaaaacaaaatatgaaaagaatcggcaatgtttcaaacaaaaagtcataaaagtcactttattcctccatcaaaaaaaaaaaaaaaaaaaaaa

SEQ ID NO: 71 - DNA, 5994 bp, Homo sapiens
gcgctgcccgcctcgtccccaccccccaaccccccgcgcccgccctcggacagtccctgctcgcccgcgcgctgcagccccatctcctagcggcagcccaggcgcggagggagcgagtccgccccgaggtaggtccaggacgggcgcacagcagcagccgaggctggccgggagagggaggaagaggatggcagggccacgccccagcccatgggccaggctgctcctggcagccttgatcagcgtcagcctctctgggaccttggcaaaccgctgcaagaaggccccagtgaagagctgcacggagtgtgtccgtgtggataaggactgcgcctactgcacagacgagatgttcagggaccggcgctgcaacacccaggcggagctgctggccgcgggctgccagcgggagagcatcgtggtcatggagagcagcttccaaatcacagaggagacccagattgacaccaccctgcggcgcagccagatgtccccccaaggcctgcgggtccgtctgcggcccggtgaggagcggcattttgagctggaggtgtttgagccactggagagccccgtggacctgtacatcctcatggacttctccaactccatgtccgatgatctggacaacctcaagaagatggggcagaacctggctcgggtcctgagccagctcaccagcgactacactattggatttggcaagtttgtggacaaagtcagcgtcccgcagacggacatgaggcctgagaagctgaaggagccctggcccaacagtgacccccccttctccttcaagaacgtcatcagcctgacagaagatgtggatgagttccggaataaactgcagggagagcggatctcaggcaacctggatgctcctgagggcggcttcgatgccatcctgcagacagctgtgtgcacgagggacattggctggcgcccggacagcacccacctgctggtcttctccaccgagtcagccttccactatgaggctgatggcgccaacgtgctggctggcatcatgagccgcaacgatgaacggtgccacctggacaccacgggcacctacacccagtacaggacacaggactacccgtcggtgcccaccctggtgcgcctgctcgccaagcacaacatcatccccatctttgctgtcaccaactactcctatagctactacgagaagcttcacacctatttccctgtctcctcactgggggtgctgcaggaggactcgtccaacatcgtggagctgctggaggaggccttcaatcggatccgctccaacctggacatccgggccctagacagcccccgaggccttcggacagaggtcacctccaagatgttccagaagacgaggactgggtcctttcacatccggcggggggaagtgggtatataccaggtgcagctgcgggcccttgagcacgtggatgggacgcacgtgtgccagctgccggaggaccagaagggcaacatccatctgaaaccttccttctccgacggcctcaagatggacgcgggcatcatctgtgatgtgtgcacctgcgagctgcaaaaagaggtgcggtcagctcgctgcagcttcaacggagacttcgtgtgcggacagtgtgtgtgcagcgagggctggagtggccagacctgcaactgctccaccggctctctgagtgacattcagccctgcctgcgggagggcgaggacaagccgtgctccggccgtggggagtgccagtgcgggcactgtgtgtgctacggcgaaggccgctacgagggtcagttctgcgagtatgacaacttccagtgtccccgcacttccgggttcctgtgcaatgaccgaggacgctgctccatgggccagtgtgtgtgtgagcctggttggacaggcccaagctgtgactgtcccctcagcaatgccacctgcatcgacagcaatgggggcatctgtaatggacgtggccactgtgagtgtggccgctgccactgccaccagcagtcgctctacacggacaccatctgcgagatcaactactcggcgatccacccgggcctctgcgaggacctacgctcctgcgtgcagtgccaggcgtggggcaccggcgagaagaaggggcgcacgtgtgaggaatgcaacttcaaggtcaagatggtggacgagcttaagagagccgaggaggtggtggtgcgctgctccttccgggacgaggatgacgactgcacctacagctacaccatggaaggtgacggcgcccctgggcccaacagcactgtcctggtgcacaagaagaaggactgccctccgggctccttctggtggctcatccccctgctcctcctcctcctgccgctcctggccctgctactgctgctatgctggaagtactgtgcctgctgcaaggcctgcctggcacttctcccgtgctgcaaccgaggtcacatggtgggctttaaggaagaccactacatgctgcgggagaacctgatggcctctgaccacttggacacgcccatgctgcgcagcgggaacctcaagggccgtgacgtggtccgctggaaggtcaccaacaacatgcagcggcctggctttgccactcatgccgccagcatcaaccccacagagctggtgccctacgggctgtccttgcgcctggcccgcctttgcaccgagaacctgctgaagcctgacactcgggagtgcgcccagctgcgccaggaggtggaggagaacctgaacgaggtctacaggcagatctccggtgtacacaagctccagcagaccaagttccggcagcagcccaatgccgggaaaaagcaagaccacaccattgtggacacagtgctgatggcgccccgctcggccaagccggccctgctgaagcttacagagaagcaggtggaacagagggccttccacgacctcaaggtggcccccggctactacaccctcactgcagaccaggacgcccggggcatggtggagttccaggagggcgtggagctggtggacgtacgggtgcccctctttatccggcctgaggatgacgacgagaagcagctgctggtggaggccatcgacgtgcccgcaggcactgccaccctcggccgccgcctggtaaacatcaccatcatcaaggagcaagccagagacgtggtgtcctttgagcagcctgagttctcggtcagccgcggggaccaggtggcccgcatccctgtcatccggcgtgtcctggacggcgggaagtcccaggtctcctaccgcacacaggatggcaccgcgcagggcaaccgggactacatccccgtggagggtgagctgctgttccagcctggggaggcctggaaagagctgcaggtgaagctcctggagctgcaagaagttgactccctcctgcggggccgccaggtccgccgtttccacgtccagctcagcaaccctaagtttggggcccacctgggccagccccactccaccaccatcatcatcagggacccagatgaactggaccggagcttcacgagtcagatgttgtcatcacagccaccccctcacggcgacctgggcgccccgcagaaccccaatgctaaggccgctgggtccaggaagatccatttcaactggctgcccccttctggcaagccaatggggtacagggtaaagtactggattcagggcgactccgaatccgaagcccacctgctcgacagcaaggtgccctcagtggagctcaccaacctgtacccgtattgcgactatgagatgaaggtgtgcgcctacggggctcagggcgagggaccctacagctccctggtgtcctgccgcacccaccaggaagtgcccagcgagccagggcgtctggccttcaatgtcgtctcctccacggtgacccagctgagctgggctgagccggctgagaccaacggtgagatcacagcctacgaggtctgctatggcctggtcaacgatgacaaccgacctattgggcccatgaagaaagtgctggttgacaaccctaagaaccggatgctgcttattgagaaccttcgggagtcccagccctaccgctacacggtgaaggcgcgcaacggggccggctgggggcctgagcgggaggccatcatcaacctggccacccagcccaagaggcccatgtccatccccatcatccctgacatccctatcgtggacgcccagagcggggaggactacgacagcttccttatgtacagcgatgacgttctacgctctccatcgggcagccagaggcccagcgtctccgatgacactggctgcggctggaagttcgagcccctgctgggggaggagctggacctgcggcgcgtcacgtggcggctgcccccggagctcatcccgcgcctgtcggccagcagcgggcgctcctccgacgccgaggcccccacggccccccggacgacggcggcgcgggcgggaagggcggcagccgtgccccgcagtgcgacacccgggccccccggagagcacctggtgaatggccggatggactttgccttcccgggcagcaccaactccctgcacaggatgaccacgaccagtgctgctgcctatggcacccacctgagcccacacgtgccccaccgcgtgctaagcacatcctccaccctcacacgggactacaactcactgacccgctcagaacactcacactcgaccacactgcccagggactactccaccctcacctccgtctcctcccacgactctcgcctgactgctggtgtgcccgacacgcccacccgcctggtgttctctgccctggggcccacatctctcagagtgagctggcaggagccgcggtgcgagcggccgctgcagggctacagtgtggagtaccagctgctgaacggcggtgagctgcatcggctcaacatccccaaccctgcccagacctcggtggtggtggaagacctcctgcccaaccactcctacgtgttccgcgtgcgggcccagagccaggaaggctggggccgagagcgtgagggtgtcatcaccattgaatcccaggtgcacccgcagagcccactgtgtcccctgccaggctccgccttcactttgagcactcccagtgccccaggcccgctggtgttcactgccctgagcccagactcgctgcagctgagctgggagcggccacggaggcccaatggggatatcgtcggctacctggtgacctgtgagatggcccaaggaggagggccagccaccgcattccgggtggatggagacagccccgagagccggctgaccgtgccgggcctcagcgagaacgtgccctacaagttcaaggtgcaggccaggaccactgagggcttcgggccagagcgcgagggcatcatcaccatagagtcccaggatggaggacccttcccgcagctgggcagccgtgccgggctcttccagcacccgctgcaaagcgagtacagcagcatcaccaccacccacaccagcgccaccgagcccttcctagtggatgggctgaccctgggggcccagcacctggaggcaggcggctccctcacccggcatgtgacccaggagtttgtgagccggacactgaccaccagcggaacccttagcacccacatggaccaacagttcttccaaacttgaccgcaccctgccccacccccgccatgtcccactaggcgtcctcccgactcctctcccggagcctcctcagctactccatccttgcacccctgggggcccagcccacccgcatgcacagagcaggggctaggtgtctcctgggaggcatgaagggggcaaggtccgtcctctgtgggcccaaacctatttgtaaccaaagagctgggagcagcacaaggacccagcctttgttctgcacttaataaatggttttgctactgctaaaaaaaaaaaaaaaaaaaaaaaaaaaaaaaaaaaaaaaaaaaaaaaaaaaaaaaaaaaaaaaaaaaaaaaaaaaa

SEQ ID NO: 72 - DNA, 2972 bp, Homo sapiens
gcgcgcggctccgatgggaagcatgacccgggtggcgggacaagacttgcttcccggccacgcgcgctcggccggccgtggggcggggcataggcgtgacgtggtgtcgcgtatcgagtctccgcccccttcccgcctccccgtatataagacttcgccgagcactctcactcgcacaagtggaccggggtgttgggtgctagtcggcaccagaggcaagggtgcgaggaccacggccggctcggacgtgtgaccgcgcctagggggtggcagcgggcagtgcggggcggcaaggcgaccatggarcttttgcggactatcacctaccagccagccgccagcaccaaaatgtgcgagcaggcgctgggcaagggttgcggaggggactcgaagaagaagcggccgccgcagccccccgaggaatcgcagccacctcagtcccaggcgcaagtgcccccggcggcccctcaccaccatcaccaccattcgcactcggggccggagatctcgcggattatcgtcgaccccacgactgggaagcgctactgccggggcaaagtgctgggaaagggtggctttgcaaaatgttacgagatgacagatttgacaaataacaaagtctacgccgcaaaaattattcctcacagcagagtagctaaacctcatcaaagggaaaagattgacaaagaaatagagcttcacagaattcttcatcataagcatgtagtgcagttttaccactacttcgaggacaaagaaaacatttacattctcttggaatactgcagtagaaggtcaatggctcatattttgaaagcaagaaaggtgttgacagagccagaagttcgatactacctcaggcagattgtgtctggactgaaataccttcatgaacaagaaatcttgcacagagatctcaaactagggaacttttttattaatgaagccatggaactaaaagttggggacttcggtctggcagccaggctagaacccytggaacacagaaggagaacgatatgtggtaccccaaattatctctctcctgaagtcctcaacaaacaaggacatggctgtgaatcagacatttgggccctgggctgtgtaatgtatacaatgttactagggaggcccccatttgaaactacaaatctcaaagaaacttataggtgcataagggaagcaaggtatacaatgccgtcctcattgctggctcctgccaagcacttaattgctagtatgttgtccaaaaacccagaggatcgtcccagtttggatgacatcattcgacatgacttttttttgcagggcttcactccggacagactgtcttctagctgttgtcatacagttccagatttccacttatcaagcccagctaagaatttctttaagaaagcagctgctgctctttttggtggcaaaaaagacaaagcaagatatattgacacacataatagagtgtctaaagaagatgaagacatctacaagcttaggcatgatttgaaaaagacttcaataactcagcaacccagcaaacacaggacagatgaggagctccagccacctaccaccacagttgccaggtctggaacacccgcagtagaaaacaagcagcagattggggatgctattcggatgatagtcagagggactcttggcagctgtagcagcagcagtgaatgccttgaagacagtaccatgggaagtgttgcagacacagtggcaagggttcttcggggatgtctggaaaacatgccggaagctgattgcattcccaaagagcagctgagcacatcatttcagtgggtcaccaaatgggttgattactctaacaaatatggctttgggtaccagctctcagaccacaccgtcggtgtccttttcaacaatggtgctcacatgagcctccttccagacaaaaaaacagttcactattacgcagagcttggccaatgctcagttttcccagcaacagatgctcctgagcaatttattagtcaagtgacggtgctgaaatacttttctcattacatggaggagaacctcatggatggtggagatctgcctagtgttactgatattcgaagacctcggctctacctccttcagtggctaaaatctgataaggccctaatgatgctctttaatgatggcacctttcaggtgaatttctaccatgatcatacaaaaatcatcatctgtagccaaaatgaagaataccttctcacctacatcaatgaggataggatatctacaactttcaggctgacaactctgctgatgtctggctgttcatcagaattaaaaaatcgaatggaatatgccctgaacatgctcttacaaagatgtaactgaaagacttttcgaatggaccctatgggactcctcttttccactgtgagatctacagggaagccaaaagaatgatctagagtatgttgaagaagatggacatgtggtggtacgaaaacaattcccctgtggcctgctggactgggtggaacccagaaccaggctaaggcatacagttcttgactttggacaatcccaagagtgaaccagaatgcagttttccttgagatacctgttttaaaaggtttttcagacaattttgcagaaaggtgcattgattcttaaattctctctgttgagagcatttcagccagaggactttggaactgtgaatatacttcctgaaggggagggagaagggaggaagctcccatgttgtttaaaggctgtaattggagcagcttttggctgcgtaactgtgaactatggccatatataattttttttcattaatttttgaagatacttgtggctggaaaagtgcattccttgttaataaactttttatttattacagcccaaagagcagtatttattatcaaaatgtctttttttttatgttgaccattttaaaccgttggcaataaagagtatgaaaacgcaaaaaaaaaaaaaaa

SEQ ID NO: 73 - DNA, 658 bp, Homo sapiens
tttttttttttttttttagatttttacatttttattttaaaacagagaatttcatattgattaacacctactactaaacagaatgatgcattaattaaatgccttgtcctaactgttataagctctgttagaaaaataaacatctcaccacaaactacagtgtcagctctttaataaatacataaaacagaagttagtagtcaatcagagttatatgaacaggttcatagtatattatgtgaaagtatcatattctccaatattctgtatcatttaagacaatttaagttacgtataattcaaagccagaaataataagaaatatgttcagtgataatttgcttctttcttagagctattttattcaaatatttaatttaaaaatatattctatattaaatttatttttacaaacgcagtattcgttaggtgaaacaaaataagtttttatgttactgataagtttaatacatttctaatttttttcagaagttcaagaaaccataatgaagtagctaatgtaaaatagtttaaaagctatgttaaatatacacaaaatgaatttctatattaatatgtgcaaatgtatattttcttataatttagaattaaagtactttatactcaatattcttaataaaatttatgtaccatactt

SEQ ID NO: 74 - DNA, 4237 bp, Homo sapiens
cagctcggtcgcccccaccggccccatggcagcccccggcgccccagctgagtacggctacatccggaccgtcctgggccagcagatcctgggacaactggacagctccagcctggcgctgccctccgaggccaagctgaagctggcggggagcagcggccgcggcggccagacagtcaagagcctgcggatccaggagcaggtgcagcagaccctcgcccggaagggccgcagctccgtgggcaacggaaatcttcaccgaaccagcagtgttcctgagtatgtctacaacctacacttggttgaaaatgattttgttggaggccgttcccctgttcctaaaacctatgacatgctaaaggctggcacaactgccacttatgaaggtcgctggggaagaggaacagcacagtacagctcccagaagtccgtggaagaaaggtccttgaggcatcctctgaggagactggagatttctcctgacagcagcccggagagggctcactacacgcacagcgattaccagtacagccagagaagccaggctgggcacaccctgcaccaccaagaaagcaggcgggccgccctcctagtgccaccgagatatgctcgttccgagatcgtgggggtcagccgtgctggcaccacaagcaggcagcgccactttgacacataccacagacagtaccagcatggctctgttagcgacaccgtttttgacagcatccctgccaacccggccctgctcacgtaccccaggccagggaccagccgcagcatgggcaacctcttggagaaggagaactacctgacggcagggctcactgtcgggcaggtcaggccgctggtgcccctgcagcccgtcactcagaacagggcttccaggtcctcctggcatcagagctccttccacagcacccgcacgctgagggaagctgggcccagtgtcgccgtggattccagcgggaggagagcgcacttgactgtcggccaggcggccgcagggggaagtgggaatctgctcactgagagaagcactttcactgactcccagctggggaatgcagacatggagatgactctggagcgagcagtgagtatgctcgaggcagaccacatgccgccatccaggatttctgctgcagctactttcatacagcacgagtgcttccagaaatctgaagctcggaagagggttaaccagcttcgtggcatcctcaagcttctgcagctcctaaaagttcagaatgaagacgttcagcgagctgtgtgtggggccttgagaaacttagtatttgaagacaatgacaacaaattggaggtggctgaactaaatggggtacctcggctgctccaggtgctgaagcaaaccagagacttggagactaaaaaacaaataacagaccatacagtcaatttaagaagtaggaatggctggccgggcgcggtggctcacgcctgtaatcccagcactttgggaggccaaggcgggcggatcacgaggtcaggagttcgagaccagcctgaccaacatggtttgctgtggaatttgtcatctaatgacaaactcaagaatctcatgataacagaagcattgcttacgctgacggagaatatcatcatccccttttctgggtggcctgaaggagactacccaaaagcaaatggtttgctcgattttgacatattctacaacgtcactggatgcctaagaaacatgagttctgctggcgctgatgggagaaaagcgatgagaagatgtgacggactcattgactcactggtccattatgtcagaggaaccattgcagattaccagccagatgacaaggccacggagaattgtgtgtgcattcttcataacctctcctaccagctggaggcagagctcccagagaaatattcccagaatatctatattcaaaaccggaatatccagactgacaacaacaaaagtattggatgttttggcagtcgaagcaggaaagtaaaagagcaataccaggacgtgccgatgccggaggaaaagagcaaccccaagggcgtggagtggctgtggcattccattgttataaggatgtatctgtccttgatcgccaaaagtgtccgcaactacacacaagaagcatccttaggagctctgcagaacctcacggccggaagtggaccaatgccgacatcagtggctcagacagttgtccagaaggaaagtggcctgcagcacacccgaaagatgctgcatgttggtgacccaagtgtgaaaaagacagccatctcgctgctgaggaatctgtcccggaatctttctctgcagaatgaaattgccaaagaaactctccctgatttggtttccatcattcctgacacagtcccgagtactgaccttctcattgaaactacagcctctgcctgttacacattgaacaacataatccaaaacagttaccagaatgcacgcgaccttctaaacaccgggggcatccagaaaattatggccattagtgcaggcgatgcctatgcctccaacaaagcaagtaaagctgcttccgtccttctgtattctctgtgggcacacacggaactgcatcatgcctacaagaaggctcagtttaagaagacagattttgtcaacagccggactgccaaagcctaccactcccttaaagactgaggaaaatgacaaagtattctcggctgcaaaaatccccaaaggaaaacacctatttttctactacccagcccaagaaacctcaaaagcatgccttgtttctatctttctctatttccgtggtcccctgaatccagaaaacaaatagaacataattttatgagtcttccagaagacctttgcaagtttgccaccagtagataccggccacaggctcgacaaatagtggtctttgttattagggcttatggtagatggcttcctggaatcaaaatgtgaattcatgtggaagggacattaatccaataaataaggaaagaagctgttgcattactgggattttaaaagtttgatttacatttatattccttttctggttcccatgttttgtcactcatgtgcacattgcttcgccattgggcctccagtgtattgttctgcagtgttgaaacagaatggaaatgacaagaaatatctgcagttatccaggagaaagtataatggcaaaattattggtttctttctttactttgtgcttgtttttatccccttggttgtttttctctgatttttaaataaacttaagaaatttagattacagagtatgcatgactgtaagaaaaagaaattgagaggaagtgatcatagcaaattaaagaagtcttttcctcccagaacttaaagtaaaataaaaaataaataaataaataaaatcttttccacagagaaaggcaactgtgatgataaaatttaagctcccccaacactgagtcaatgagatttttctcaggagatactttacctataacaacgccgttaaatccaaatctcttctaaacgatggcattctatgtaatgcctttcctggacttttttggccactgcctggactagtgaaagaatggactctatctttatctgcaagaggaactaaggccttctatcagactgcctggccagcctggggcactgaaaatacggctcatgttaatgagttacattatcagccagcccagccttgcccaccatttaagaaatatcacagagccactagatctcatatgatcttcttcaagccattattttaactcaagaaaactctagagaagaaaagtgaagaagtcatgttgaagaagatgtaagaatgtgtcaagaccatccagaaatgatatgagaaatactgatattttaaatggttgacatcatccagcgaaatgaatctacattaaatgttgttttaactgcgctatgattaaaaccattcatatagagttagtctttacaactactattctgttatttttttttttaatctgacaacatttgtcctaagtaagataagcaaaaaaattcttcaactccttttggcaagaaaactgtaacagaaaataaattttgaatgtgtacttaagtctttattatatttgaagcaattttttttcaattttaaaagctgaatgaagacaacttaggttgctaacctagttcaaaatgaaattatttagataccaatttttaaaatactggagagaatttatatgtctttttccagagttctgatgataagca

SEQ ID NO: 75 - DNA, 1177 bp, Homo sapiens
gccaaggctggggcaggggagtcagcagaggcctcgctcgggcgcccagtggtcctgccgcctggtctcacctcgctatggttcgtctgcctctgcagtgcgtcctctggggctgcttgctgaccgctgtccatccagaaccacccactgcatgcagagaaaaacagtacctaataaacagtcagtgctgttctttgtgccagccaggacagaaactggtgagtgactgcacagagttcactgaaacggaatgccttccttgcggtgaaagcgaattcctagacacctggaacagagagacacactgccaccagcacaaatactgcgaccccaacctagggcttcgggtccagcagaagggcacctcagaaacagacaccatctgcacctgtgaagaaggctggcactgtacgagtgaggcctgtgagagctgtgtcctgcaccgctcatgctcgcccggctttggggtcaagcagattgctacaggggtttctgataccatctgcgagccctgcccagtcggcttcttctccaatgtgtcatctgctttcgaaaaatgtcacccttggacaagctgtgagaccaaagacctggttgtgcaacaggcaggcacaaacaagactgatgttgtctgtggtccccaggatcggctgagagccctggtggtgatccccatcatcttcgggatcctgtttgccatcctcttggtgctggtctttatcaaaaaggtggccaagaagccaaccaataaggccccccaccccaagcaggaaccccaggagatcaattttcccgacgatcttcctggctccaacactgctgctccagtgcaggagactttacatggatgccaaccggtcacccaggaggatggcaaagagagtcgcatctcagtgcaggagagacagtgaggctgcacccacccaggagtgtggccacgtgggcaaacaggcagttggccagagagcctggtgctgctgctgctgtggcgtgagggtgaggggctggcactgactgggcatagctccccgcttctgcctgcacccctgcagtttgagacaggagacctggcactggatgcagaaacagttcaccttgaagaacctctcacttcaccctggagcccatccagtctcccaacttgtattaaagacagaggcagaaaaaaaaaaaaaaa

SEQ ID NO: 76 - DNA, 3230 bp, Homo sapiens
ggtggaggacgcggctgcttcaagtccttggctctgatccaggccacagattccaggattctacaggcaggaaacatcttagaaatcagggttgggcaggcaggagccaggagagtagctacaatgacttcaccagtactggtggacatacgagaagaggtgacctgccctatctgcctggagctcctaacagaacccctgagcatagactgtggccacagcttctgccaagcctgcatcacaccaaatggcagggaatcagtgattggtcaagaaggggaaagaagctgccctgtgtgccagaccagctaccagccagggaacctgcggcctaatcggcatctggccaacatagtgaggcggctcagagaggtagtgttgggccctgggaagcagctgaaagcagttctttgtgcagaccatggagaaaaactgcagctcttctgtcaggaggatgggaaggtcatttgctggctttgtgagcggtctcaggagcaccgtggtcaccacacgttcctcgtggaggaggttgcccaggagtaccaggagaagtttcaggagtctctaaagaagctgaagaacgaggagcaggaagctgagaagctaacagcttttatcagagagaagaagacatcctggaagaatcagatggagcctgagagatgcaggatccagacagagtttaatcagctgcgaaatatcctagacagagtggagcaacgggagctgaaaaagctggaacaggaagagaagaaggggctacgaattatagaagaggctgagaatgatctggtccaccagacccagtcgctgcgagagctcatctcggatctggagcgtcgatgtcaggggtcaacaatggagctgctgcaggatgtgagtgatgtcacagaaaggagtgagttctggaccctgaggaagccagaagctctccctacaaagctgagaagtatgttccgagccccagatctgaaaaggatgctgcgagtgtgtagagagctgacagatgtccaaagctactgggttgacgtgaccctgaatccacacacagctaatttaaatcttgtcctggctaaaaaccggagacaagtgaggtttgtgggagctaaagtatctggaccttcctgtctggaaaagcattatgactgtagtgtcctgggctcccagcacttctcctctggtaagcattactgggaggtagatgtggccaagaagactgcctggatcctaggggtatgcagcaattcactgggacctacattctctttcaaccattttgctcaaaatcacagtgcttactccaggtatcagcctcagagtggatactgggtgattgggttacagcataaccatgaatatagggcctatgaggattcttccccttccctgcttctctccatgacagtgccccctcgccgtgttggggttttcttagattatgaggctggtactgtctccttttataatgtcacaaaccatggcttccccatctacactttctctaaatattactttcccactactctttgtccatattttaatccttgcaactgtgtaattcctatgaccctgcgtcgtccaagctcttgaatattcttctgttcccacccacttctgataagtaccctgaggcttatcagcatgtgattctcccttctgatcttctgtttttctgtgttctcaattcttttgttgttttttggtttttgaatcttttttgagatggaatctcgctctgtcgcccaggctggagtgcactggcgcaatctcggctcactgcaacctctgcctcctgggttcaagcgaacctcctgcctcagcatcccaagtagctgggattacaggcacccaccaccatgcccaactaatttttgtatttttatagagatagggtttcaccgtgttggccaggctgatctcgaactcctgaccgcaagtgatccacccgcctcggtctcccaaagtgctgggattacagatgtgagccgccgcgcccagacagttctttcgttttaaacagttactcagtactaggatgcacccagtggtgagagtaagcatctttgactgatgacaggtcttgaggtggatagggggcgctttcagtattttgccattaagcatagtatttgatgcaggttttttttgattgatgcaggggatcaaatttaggaagttctgatctgttaatttactacaagtttttgtataaaatgaaaactcgtattctacctatgtcttttctgtaaattattgagacaattgtgtatcatttttgttctgttaatgtggcttagtacattgatttacttcaatttgttaccacaacttgctgaaatacaccattattatttgttgtatgcaatactggatttattttgataacgtattgtttagattttgttctcatctatgttaatgaaagaaattggcctgtatttttacattcttgtaatatctttgccaggttctataaaatgcaataataagcaaataaattactttgtttttgtataagtatgtataggattgagctctaaaaccaaaccattataatgataatttgggtagcttcaaactcaaattgaagagagtcttcactacaatcttcactacaacctttggccttcctctctacatttaagagtagcaatagaacaataaaaaaaaatacgtctttcaaattaattgcagtaaaaacaaaagagtagtggggagagaaaaacaatccaatacatatttttctctcagaatagaaagaaaacacaaagagaaaatatgaacaatataaagcacttaaaggaagaggatgatttcttccagcttttccacactctctttatgcgcaggaacaaacagctgttgagtgagctgctatgactttggtagagaggtgcaatatgttttttgaaccagctataaaagaaattaagaggtacatgtgagggtagaaacaaatatcaaggatgagaatggcactggctgtcccatatggtatccaggagccaccaatgtctgttgagtacttcatacatgcctagtctgaattgagatgtgctcaatgtataaaatatataccagatttcaaatacctacttcaaaaaataatgtaaaatatctcactaataacttttcctttgtgtattgcaatgataatatgttggctctattggattaaataaagtatgttattcattttaaaaaaaaaaaaaaaaaaaaaaaaaaaaaaa

SEQ ID NO: 77 - DNA, 1320 bp, Homo sapiens
ggagcaacgctaggaagggcgggcagaaagggcacgctcttgtgggtgactacaggttaggagaccgttgaacctggaggggccctaggatggaccccgtggaaagattcagagactgcgccctctccctggcgccgccttcccctacacgcggcgggtatattctgttgcagttggcccaggacctgtttccaagactctgccccctcgcacttccgtccctcctggttttgtaaagtgatgctcataggaacccccaccccgcgtgacactactcccagctcctggctgacttctagtcttctggttgaagctgcgcctttagatgacacgaccctacccacccctgtttccagcggatgcccgggcctggagcccacagaattcttccagtccctgggtggggacggagaaaggaacgttcagattgagatggcccatggcaccaccacgctcgccttcaagttccagcatggagtgattgcagcagtggattctcgggcctcagctgggtcctacattagtgccttacgggtgaacaaggtgattgagattaacccttacctgcttggcaccatgtctggctgtgcagcagactgtcagtactgggagcgcctgctggccaaggaatgcaggctgtactatctgcgaaatggagaacgtatttcagtgtcggcagcctccaagctgctgtccaacatgatgtgccagtaccggggcatgggcctctctatgggcagtatgatctgtggctgggataagaagggtcctggactctactacgtggatgaacatgggactcggctctcaggaaatatgttctccacgggtagtgggaacacttatgcctacggggtcatggacagtggctatcggcctaatcttagccctgaagaggcctatgaccttggccgcagggctattgcttatgccactcacagagacagctattctggaggcgttgtcaatatgtaccacatgaaggaagatggttgggtgaaagtagaaagtacagatgtcagtgacctgctgcaccagtaccgggaagccaatcaataatggtggtggtggcagctgggcaggtctcctctgggaggtcttggccgactcagggacctaagccacgttaagtccaaggagaagaagaggcctagcctgagccaaagagagagtacgggctcagcagccagaggaggccggtgaagtgcatcttctgcgtgttctctatttgaacaagcatttcccccagggaagtttctgggtgccccactaagtagaataaagaaaaacggttataaataaaaaaaaaaaaaaaaaaaa

SEQ ID NO: 78 - DNA, 3547 bp, Homo sapiens
gcactcgcccggctcgcccgctttcgcacccagttcacgcgccacagctatgtgtccccgagccgcgcgggcgcccgcgacgctactcctcgccctgggcgcggtgctgtggcctgcggctggcgcctgggagcttacgattttgcacaccaacgacgtgcacagccggctggagcagaccagcgaggactccagcaagtgcgtcaacgccagccgctgcatgggtggcgtggctcggctcttcaccaaggttcagcagatccgccgcgccgaacccaacgtgctgctgctggacgccggcgaccagtaccagggcactatctggttcaccgtgtacaagggcgccgaggtggcgcacttcatgaacgccctgcgctacgatgccatggcactgggaaatcatgaatttgataatggtgtggaaggactgatcgagccactcctcaaagaggccaaatttccaattctgagtgcaaacattaaagcaaaggggccactagcatctcaaatatcaggactttatttgccatataaagttcttcctgttggtgatgaagttgtgggaatcgttggatacacttccaaagaaaccccttttctctcaaatccagggacaaatttagtgtttgaagatgaaatcactgcattacaacctgaagtagataagttaaaaactctaaatgtgaacaaaattattgcactgggacattcgggttttgaaatggataaactcatcgctcagaaagtgaggggtgtggacgtcgtggtgggaggacactccaacacatttctttacacaggcaatccaccttccaaagaggtgcctgctgggaagtacccattcatagtcacttctgatgatgggcggaaggttcctgtagtccaggcctatgcttttggcaaatacctaggctatctgaagatcgagtttgatgaaagaggaaacgtcatctcttcccatggaaatcccattcttctaaacagcagcattcctgaagatccaagcataaaagcagacattaacaaatggaggataaaattggataattattctacccaggaattagggaaaacaattgtctatctggatggctcctctcaatcatgccgctttagagaatgcaacatgggcaacctgatttgtgatgcaatgattaacaacaacctgagacacacggatgaaatgttctggaaccacgtatccatgtgcattttaaatggaggtggtatccggtcgcccattgatgaacgcaacaatggcacaattacctgggagaacctggctgctgtattgccctttggaggcacatttgacctagtccagttaaaaggttccaccctgaagaaggcctttgagcatagcgtgcaccgctacggccagtccactggagagttcctgcaggtgggcggaatccatgtggtgtatgatctttcccgaaaacctggagacagagtagtcaaattagatgttctttgcaccaagtgtcgagtgcccagttatgaccctctcaaaatggacgaggtatataaggtgatcctcccaaacttcctggccaatggtggagatgggttccagatgataaaagatgaattattaagacatgactctggtgaccaagatatcaacgtggtttctacatatatctccaaaatgaaagtaatttatccagcagttgaaggtcggatcaagttttccacaggaagtcactgccatggaagcttttctttaatatttctttcactttgggcagtgatctttgttttataccaatagccaaaaattctccttgcctttaatgtgtgaaactgcattttttcaagtgagattcaaatctgccttttaggacctggctttgtgacagcaaaaaccatctttacaggctcctagaagctgaaggttagagcattataaaatgaagagacagacatgattactcagggtcagcaacctagtgagttagaaaaaaaattaacatagggccctataaggagaaagccaactatgttaagtttacgtgtccaaattttaatgaaattttactaacaattttaaaccatatttttcttcttcatatccatttctaatccatcaaacagcttatgtttacataaaattttatcattcacaaggaagttttaagcacactgtctcatttgatatccacaacttatttttggtaggaaagagagatgtttttcccacctgtcagatgaaaaaactgaagctcaaaaagggttgacttgaccatacagctaatgctgacagatccaagacctagacctaggtcttttgaactcaagtccagcattctcaactatatcaagttactgttcagaatacttaatatctcctctcttcataattatcaatagccccaagctcatggatgacaaatctctgctttatttcttgtctctattttttcactttatagctcctgttataatagcaagtttaatggtataaacacaggataccatcctctcttgcaacacccatgtgcctttgatgagtcaggtagcaagctgtagtagataatgagaaaggccagaggctgcaaagacagtcaaaggacacgagagaaaggaaggggaagaacaggactccaggactgttttatattatagaaaagcaagagctaaagagcatttacacatgttaaacagatacttgttaagcatagtgcctgacacacggcattagctgttattttatgagattccatcagctctgcctctgtcctctttcttctaacatgaaggtatcatgagaagagaaccttctaacataagctgtaattctaaacctgcacttgtccctctccagcaagaggctagcactgaattcattctactcatactacacacccagttatggaatgtccagagttctcgaagaaaataaatgactttaggaagaggtatacattttttaagtcgctctgcctccaaatctgaacagtcactgtaaatcattcttaagcccagatatgagaacttctgctggaaagtgggaccctctgagtgggtggtcagaaaatacccatgctgatgaaatgacctatgcccaaagaacaaatacttaacgtgggagtggaaccacatgagcctgctcagctctgcataagtaattcaagaaatgggaggcttcaccttaaaaacagtgtgcaaatggcagctagaggttttgataggaagtatgtttgtttcttagtgtttacaaatattaagtactcttgatacaaaatatacttttaaacttcataacctttttataaaagttgttgcagcaaaataatagcctcggttctatgcatatatggattgctataaaaaatgtcaataagattgtacaaggaaaattagagaaagtcacatttagggtttattttttacacttggccagtaaaatagggtaaatcctattagaaattttttaaagaactttttttaagtttcctaaatctgtgtgtgtattgtgaagtggtataagaaatgactttgaaccactttgcaattgtagattcccaacaataaaattgaagat

SEQ ID NO: 79 - DNA, 4116 bp, Homo sapiens
cggaggtctccgggtggtatcgccctttcctctttgccagcccgctggcgagccgagccggggcaagatgaggtcgtcctgtgtcctgctcaccgccctggtggcgctggccacctattacgtctacatcccgctgcctggctccgtgtccgacccctggaagctgatgctgctggacgccactttccggggtgcacagcaagtgagtaacctgatccactacctgggactgagccatcacctgctggcactgaattttatcattgtttcttttggcaaaaaaagcgcgtggtcttctgcccaagtgaaggtgaccgacacagactttgatggtgtggaagtcagagtgtttgaaggccctccgaagcccgaagagccactgaaacgcagcgtcgtttatatccacggaggaggctgggccttggcaagtgcaaaaatcaggtattatgatgagctgtgtacagcaatggctgaggaattgaatgctgtcattgtttccattgaatacaggctagttccaaaggtttattttcctgagcaaattcatgatgttgtacgggccacaaagtatttcctgaagccagaagtcttacagaagtatatggttgatccaggcagaatttgcatttctggtgacagtgctggtggaaatctggctgctgcccttggacaacagtttactcaagatgccagcctaaaaaataagctcaaactacaagctttaatttatccagttcttcaagctttagattttaacacaccatcttatcagcaaaatgtgaacaccccaatcctgccccgctatgtcatggtgaagtattgggtggactacttcaaaggcaactatgactttgtgcaggcaatgatcgttaacaatcacacttcacttgatgtggaagaggctgctgctgtcagggcccgtctaaactggacatccctcttgcctgcatccttcacaaagaactacaagcctgttgtacagaccacaggcaatgccaggattgtccaggagcttcctcagttgctggatgcccgctccgccccactcattgcagaccaggcagtgctgcagctcctcccaaagacctacattctgacgtgtgagcatgatgtcctcagagacgatggcatcatgtatgccaagcgtttggagagtgccggtgtggaggtgaccctggatcactttgaggatggctttcacggatgtatgattttcactagctggcccaccaacttctcagtgggaatccggactaggaatagttacatcaagtggctagatcaaaacctgtaaaggagcaaaacttccagaagcctcgagcccctcttgacctcctacacctgctttggaaagacatgcactttttagttgactaattcttcctcccattcccctctacttgcgagttatggaatttctattccataactgaagtctttatgataacctaatttttaaaaatgaatttgactaacttaagtgcaaaacatgtaaatttggttcccagagtgggccaatctctctgttcttgttatcttagccaactatactcatacctacagctacagaaagcaggactaggaactggaaataactttgggtcctgccttcattaggacgttctttttagaagcagttcttccagctctggatcatagagtgacctttaataagttaaaaaaacgaggactccttaattctgctagagttaaccttgagttcagagcagtattaaatgcgtgcactttcaggtcagtactggggaccaagtaccctctggtcttttgtgaatggatggttttgtttcctatgggaattttggcaaaggttttctggaaagaacaagtttctcaaaggactttcttcctctagaatgttcattttatgagatcgctatctgtaagtccagttggattacaggaatacttgaaagttactttctaccactattagaaaatatgaagtcgcatgcactggatatctatatatcattaggtttttgttgtgtttttggttatgctgtcccccttctccttggggagatatttgggagcaaacttatttagatttagagtaaacttttcattatagagcaagtaaaaacagacaaatgaaacaacctagtgtttcacataaaaatacttctgacataaagtaccaagagcagtgtgaatatacttggcatagtcaaaaaagaaaatacatttaatattagttaaaaattgttaaaaatacctttagaaggtctagtctattattgaaaactcaattttttcacttatatggctttaaaatggagctattttgctacaatataatgtattgtttatttttttaagttatttaatgttaatatacatagctagacttaaggtttttcagaaagatgtccataataaatattaaaaacaatggtatttttaaaaaaactgccttagggttttaaaaccttccctacagttataaccacgtgtaattttgtggaaatgatataacagctattaatactactataacataggcataaatattttcgtgtttatatgcatatacaagttaaaataattagaaactatgactgcgcctagtaaagtcatctaggtttatagttcagtagcttaggcaaggcacacactgctcatctccgctttttagggtcagaggaacacaagctcatgttctgagtgaagggcgtacactggcacctggtgttgcctagatcccccatctcctccttccagccaggtctggaagtttcaacagcccaagcttaacttcatgtaaagtcttcactgccagtgggaacatctttgacacaacaagacactccaattgtgatttgagttgaggatctctgcctgccttcctgccgtccttccttcttccccgatccatgctacttttaggggctgcggagagcagcagcagagctgagtaatgatacagggcaccacggagagaaagtagaaccatttcactcctgggaagatggggtatttcccacttccagcaacgaaataacaaatgaaaagttgcatacttattgatgtattgtatgagccagtagcattttatgtacaaaacagaagtcaatgcaacagtatgtatgtgtgcctgtgtgtgtataaaaataaccattgaagctaacttgctaatgtacttaggcaagccacttcccatctctgggcctcgtctttcctccctctaaaatcaaagagctgaattatgtgatccttgaggtctcttccacttataataccaactgtcttgtcagactggcaaattatattggcctctccttatgtggtggtttttttggtaggtcatagttccttatacacggacacctgcatcatcgaaggtctttttttcctaaaaaaaaaaaatgggattttagttcttattctgtgataactatcctcctcatataatactattctttttgacaccatttgaaggaaccaatatttggaccttattttgaggttgtctgtctcgaagaaaaagaaaataaaatgtataggcagggttccttcaattggcattttccccagaattgtgagccaaagcctatagtaattgcagacagcaaatgattccggatctctaaaaggctctctcagatgaaaagggagtaaaggaaaaaagagggaggtcaaccactgtttctgataatgtacttgagtttcattgttcttttagtttgtattcttataaaaaatgtttacactctgcagattgattttttttttttagtactgtggctttcttttcctattttatgaaaaaaatgataatctttttgtaaaattgtctgtgaaatataaacattaatatataaagaaaaaccttgaagtgctgtatagtgaagtataaattaatgttttattgatttgtgaagaatttaagactattatataattatcttggtggatctattttatgcatgaccttttaacctttgactttgcttatttcccactacgaaggggaaggtagattttatgaatgattttaatagcaaatatattttataaagtgaaaatccagtgtggaggtagcaaagcatctatctattctgaatcatgtttggaaataaaattgctccatctggg

SEQ ID NO: 80 - DNA, 484 bp, Homo sapiens
ccgttcgctccggacaccatggacaagttttggtggcacgcagcctggggactctgcctcgtgccgctgagcctggcgcagatcgatttgaatataacctgccgctttgcaggtgtattccacgtggagaaaaatggtcgctacagcatctctcggacggaggccgctgacctctgcaaggctttcaatagcaccttgcccacaatggcccagatggagaaagctctgagcatcggatttgagacctgcagtttgcattgcagtcaacagtcgaagaaggtgtgggcagaagaaaaagctagtgatcaacagtggcaatggagctgtggaggacagaaagccaagtggactcaacggagaggccagcaagtctcaggaaatggtgcatttggtgaacaaggagtcgtcagaaactccagaccagtttatgacagctgatgagacaaggaacctgcagaatgtggacatgaagattggggtgtaa

SEQ ID NO: 81 - DNA, 4091 bp, Homo sapiens
gaaagccgcagcctcagtcccgccgccgcccgctgcgtccgcccagcgccagctccgcgtcccgaccggcccgcggcagcctgcgccgcgccatggccacctccccgcagaagtcgccttctgtccccaagtctcccactcccaagtcgcccccgtcccgcaagaaagatgattccttcttggggaaactcggagggaccctggcccggaggaagaaagccaaggaggtgtccgagctgcaggaggagggaatgaacgccatcaacctgcccctcagcccaattccctttgagctggaccccgaggacacgatgctggaggagaatgaggtgcgaacaatggtggatccaaactcacgcagtgaccccaagcttcaagaactgatgaaggtattaattgactggattaatgatgtgttggttggagaaagaatcattgtgaaagacctagctgaagatttgtatgatggacaagtcctgcagaagcttttcgagaaactggagagtgagaagctaaatgtggctgaggtcacccagtcagagattgctcagaagcaaaaactgcagactgtcctggagaagatcaatgaaaccctgaaacttcctcccaggagcatcaagtggaatgtggattctgttcatgccaagagcctggtggccatcttacacctgctcgttgctctgtctcagtatttccgcgcaccaattcgactcccagaccatgtttccatccaagtggttgtggtccagaaacgagaaggaatcctccagtctcggcaaatccaagaggaaataactggtaacacagaggctctttccgggaggcatgaacgtgatgcctttgacaccttgttcgaccatgccccagacaagctgaatgtggtgaaaaagacactcatcactttcgtgaacaagcacctgaataaactgaacctggaggtcacagaactggaaacccagtttgcagatggggtgtacctggtgctgctcatggggctcctggagggctactttgtgcccctgcacagcttcttcctgaccccggacagctttgaacagaaggtcttgaatgtctcctttgcctttgagctcatgcaagatggagggttggaaaagccaaaaccgcggccagaagacatagtcaactgtgacctgaaatctacactacgagtgttgtacaacctcttcaccaagtaccgtaacgtggagtgaggggctgccctgggcccaccactgcccaagagttcttgctgttggcgtactggaccctcctccgaactgccttaccctgcttattcctgtctcttgcactgtgctctcccacaagtccagctgcaacccagagatagtggaaactgaaattaggaaggaaatcatcaataactcagtgggctgacccatccctcccaggcgctggggaccaacctagcaatgaaggttgggaaggttgttcccttcccggtgccaggtccagatttccctccatgatttgggaaccagcttaggcaaaagagtccccacaagatgaaaataaagatcctagttaccattcaaaggatgctaactgtgtgtcaggccccacactaagtgctctgctctgatatactcaaggccattaatcttcaggactcccattgacgtaggtgtttcattccccttttacagatgaggaaactaaggcttggaggttaaatgacttgccagaagttggaatttttttcctctttgaacataacctctcccttctccctaaaggtaaccactattctgagtccaatcatcaaggttttgcttttctttttagctaagtatgcattcctcaatagtagacagtacaacatgtttataacaagccaattacattatgttctttgcatgttctaaagttgtgtatgtgtgtgcacatctgagcacgtgcacatgtacacctgagccaaaaacacgagaacccactgatctcaccactggggcaagctaggtcagagcttagtgattcacactgaaattggcaaattggatttaacccaattaatagtgtgtgtgtggcaggagtcatgtccctcacatcctttgtacaaatgaaaattactcttaattccttcagatttataataactctgtactttggtttcagggtgacatttgggaaggattttgtttagaattaatggagtggcacattttgcagcctttttgcttgattgcatgtaatggaaatgccctatattttcctgcaaaataagtactaaattcattatcgttaagcaaatgtacaatatgctcaggcaccgcagagagctgggcacgggcccatgtgagcatcactttggaagtagggctcttcaacagggacccttgaactttaaagaaaggaacttctttttgccttctaattgatcatttagactattctggctaagtctgcccacatgtaattaccggctaattcaagcgaggaaaaatgtaagtcatttagaccaaagccaagcagtttctttgcgtgggttactcaagggcttgtggttacttgtatctcctctatgtgaacttgactttgaaagacagagctctagtgtgccagcctgctaagtcctgtaagaatagggaagggcggaggggggtgggcagtgactaggggacgagaagcatggggaaaatatttgcactctaaacatacagagatagaggtggggcttgtggtacttaacacttgtagccatcaactgactgagaccttgggctaaataatcaattgtgctgatattacatctcgttatggaatgttcctaaatatgccaggtagacaccagcccaagtaccctcctccagaagtctgtgactaccttgtcactactttaggcccattccacaaagcccatctctggtttgagaattcattttgatctgtatctacaccacccaaagttaggcctcctataatgtccaaaacattcctttcagcctttttatttcttactgtactgtctcttactgtactgtctatctgcagtaattgaggacccataaaatttagataactacatgtctttgctcttagaattgtcactcagcataatgagcatttaacatacaaaggcaatgtactgttttgtgttgatctatgtaaaagaatacaattcttttttacataattagtgaaattttattttttattaggaaacactaaatagtgtaatatttcttttgcttttaaaaaaattcctggtagcaaatcaagataaataattgcttcattttcttgagcaatactgaagcaggatgaagtaagaggaatgcattcatttaaacatgctttgctttatgaattttgtctcttttttggtctctttttcttatattcaagttacaaatgtacaagtatccttactaagagtgctccttttgtattttacatatatacagtatgaaaatacattggaacactaggaaagtttttaaataacagttctaatttatcagaaaattgtgttttgggattgagttctttgtctcagcccagaatcccaggtcctgggcctggttttctaatgctgtcatctcagttcgatattttactttagaatctggaatctcctacttaatatatgaccatgactttgaaaggcaaaagaggaatcaagaataaataaaacaaacttaatcttcatctttaaaaaaaagaaaaaagaaaccaaaatgagaatcaacacttcataggctcactgggttttcttttcttttctgttaatttaaactcagttatttttaatgcttaatacatacatggtgcaaaatttaaaaagcgcaaataggtatctagtggaaaacctaagcctccctctctctccggcacccattacctctccctggaggcaactgttttgatccatttcttacacacactgccagagatactctaggcatgtaaagcacaaacatacatataaaatctgcgggcttcaaaaaatataagtaggatgtcatctatactgtcatacactttgttttttatcacttacttaatgttatatcttggatattgtattaccctgggtattaaaaagaactcctttcacattttaaaataaaaaa

SEQ ID NO: 82 - DNA, 4341 bp, Homo sapiens
gagctagcgcctctctgggtgtccgtgccagtgctgcgcgggaaggcaccaccaccacagccgccgccgctggccagggtgctggacaagacgggcccgtcggccacctcgccagctcaggcacccgctgcagccgtcgctgtctcctcccagaccggtccccatggaggagatggaagaggagttgaaatgccccgtgtgcggctccttctatcgggagcccatcatcctgccctgctctcacaatttgtgtcaggcgtgcgcccgcaacatcctggtgcagaccccagagtctgaatccccccagagccatcgggccgcgggctccggggtctccgactatgactatctggacctggacaagatgagcctatacagcgaggcggacagcggctatggctcctacggggggttcgccagcgcccccactaccccgtgccagaagtcccccaacggcgtccgcgtgtttcccccggctatgccgccaccggccacccacttgtcaccggccctggccccggtgccccgcaactcctgtatcacctgcccccagtgtcaccgcagcctcatcctggatgaccgggggctccgcggcttccccaagaatcgcgtactggaaggggtaattgaccgctaccagcagagcaaagccgcggccctcaagtgccagctctgcgagaaggcgcccaaggaagccaccgtcatgtgcgaacagtgcgatgtcttctactgcgatccgtgccgcctgcgctgccacccgccccgggggcccctagccaagcaccgcctggtgcccccggcccagggtcgtgtgagccggaggctgagcccacgcaaggtctccacctgcacagaccacgagctggagaaccacagcatgtactgcgtgcaatgcaagatgcccgtgtgctaccagtgcttggaggagggcaaacactccagccacgaagtcaaggctctgggggccatgtggaaactacataagagccagctctcccaggcgctgaacggactgtcagacagggccaaagaagccaaggagtttctggtacagctgcgcaacatggtccagcagatccaggagaacagtgtggagtttgaagcctgtctggtggcccaatgtgatgccctcatcgatgccctcaacagaagaaaagcccagctgctggcccgcgtcaacaaggagcatgagcacaagctgaaggtggttcgagatcagatctctcactgcacagtgaaattgcgccagaccacaggtctcatggagtactgcttggaggtgattaaggaaaatgatcctagtggttttttgcagatttctgacgccctcataagaagagtgcacctgactgaggatcagtggggtaaaggcacactcactccaaggatgaccacggactttgacttgagtctggacaacagccctctgctgcaatccatccaccagctggatttcgtgcaagtgaaagcttcctctccagtcccagcaacccctatcctacagctggaggaatgttgtacccacaacaacagcgctacgttgtcctggaaacagccacctctgtccacggtgcccgccgatggatacattctggagctggatgatggcaacggtggtcaattccgggaggtgtatgtggggaaggagacaatgtgcactgtggatggtcttcacttcaacagcacatacaacgctcgggtcaaggccttcaacaaaacaggagtcagcccgtacagcaagaccctggtcctccaaacgtctgaggtggcctggtttgctttcgaccctggctcggcgcactcggacatcatcctctccaatgacaacctgacagtgacctgtagtagctatgatgaccgggtggtgctagggaagactggcttctccaagggcatccactactgggagctcacggtagatcgctatgacaaccaccctgatcctgcctttggtgtggctcgcatggacgtgatgaaggatgtgatgttaggaaaagacgacaaagcttgggcaatgtatgtggacaataaccggagctggttcatgcacaacaactcgcacaccaacagaactgagggagggatcacaaaaggggccacaattggggtcctcctcgacttaaatagaaaaaacttgacattttttatcaacgatgaacaacaaggtcccatagcatttgataacgtggagggcctcttcttccctgcggtcagcctgaacaggaacgtgcaggtcacgctgcacaccgggctcccagtccccgacttctactccagcagagcatcaatagcctaaggatgtgccgtggaggcgccagctgcctgttcttacctccgcctgcgagagccacagcaaggagctcagccagccgtggtggggtgcagagttggcaggagtgggagaaggaggagagaaaagctggtcctctgcagtctttacacccacagctctgcccttttccctttcaacctctcctccgctgtcatgcctgcttccgcttccatgtccaacaattctaaccaacaaaggacctagacagcccaccaagtcacttggttcccactcccagattttgcttttatttaacttaattttttatgtaggtgagttatattttctttcttttctgatcaggttattggtgacttactggactggcaccgccaggagaaaattctcctgctaactttttttcttaagctttctgtcaaacaatgaggttgtagggggaggtagggaagaatgagctgaatttgtagcatacagcttacctgctagaatgttcttaccctcttacctctcctgtagcgttagctctgcagagctaagctttgggagaatgaatctatcactgagaagttttactactcattgaagcacaaaaatatccgctacacaggttcacatcagggtaggatcgttaggatggctctataattaggataggccagaaccctggccactgtataaaattggaaagtctctaagacacaggcaaaccaggggacttaatgatttggttcgtttatttaataaaagcttttaattgagaacctactattgaccaggcactgttcaagacactagaacattatgttctagacactgtggggacacagtggtgaacagacaggcatggtctctgcccttcggagcttatattccagtaggagaaaaagcaaaaataaaataattataaatggtcatatgtactagaaaggaaatgggcaagggtcaaagagactcatgggcaagatctttcaggcttcctagaatgatgctaaaaatccacacattctggccatagcaccagaaatgtaccaactcaatgccttttcagctgcactatttaattatggtacctgctgccactcatcacagagcccttcttggtagaaatgatgtcagcattcttatttgctgatgctgctatgataccacgccttaaaaattgacagttgaaaaaaaaaagagtgaccagagggcaaaggacccattctcagtaatgggagatcttgagttgcagtccacagcattcacattctcaggataaacatgcttgtctccatatatactatctgtgcctgttatgaatgaaaaatccatccactctgctgccattcacagcctaattttctggagtagtccaaacaatgtttggaaaaacatgggactgtatgtcattactatgactgatagcagaataataatgcatcttacttctatatagagatagacttacataggttacccttgaaattcattagtttgtcataaagttttaggaaaggtaggacccggaaagaagttctaattagttgtctaaatatttttcagtgagccaagaaattcaccatgaaaaaacaagaataacaaatagaagggaagagataggatgggaaagctaacaaattaaagttttggcaaaaaggaatatatgtaaatagctaattatttacttttgtgcttactttatttagattatttctatcagttacaatctttttctagttaagtgtacctaatttatggaatgggtgctatcctgtttatgtgtgtcttggtttttcttggctacagaaaaactgttgcagggcaacactagtttgatatttgatttactctccaatgagactcaatggctgggccgtggtagactcatagttcctcttgttctttattaaattcatcctgctaattagatttctagtgacttgtaacatgtagtttacactgaattgcaattacagatgcatacaactactatactagaaaaaattgtcatttctgatgtgccaataaatgatttttatgagagaaaaaaaaaaaaaaaaaaaaaa

SEQ ID NO: 83 - DNA, 1261 bp, Homo sapiens
gcagttatcatagagcacagtccctcacatcacacagctgcagagatgagtaaacaaagaggaaccttctcagaagtgagtctggcccaggacccaaagcggcagcaaaggaaacctaaaggcaataaaagctccatttcaggaaccgaacaggaaatattccaagtagaattaaatcttcaaaatccttccctgaatcatcaagggattgataaaatatatgactgccaaggtttactgccacctccagagaagctcactgccgaggtcctaggaatcatttgcattgtcctgatggccactgtgttaaaaacaatagttcttattcctttcctggagcagaacaattcttccccgaatacaagaacgcagaaagcacgtcattgtggccattgtcctgaggagtggattacatattccaacagttgttattacattggtaaggaaagaagaacttgggaagagagtttgctggcctgtacttcgaagaactccagtctgctttctatagataatgaagaagaaataaaatttctggccagcattttaccttcctcatggattggtgtgtttcgtaacagcagtcatcatccatgggtgacaataaatggtttggctttcaaacataagataaaagactcagataatgctgaacttaactgtgcagtgctacaagtaaatcgacttaaatcagcccagtgtggatcttcaatgatatatcattgtaagcataagctttagaagtaaagcatttgcgtttacagtgcatcagatacattttatatttcttaaaatagaaatattatgattgcataaatctgaaaatgaattatgttatttgctctaatacaaaaattctaaatcaattattgaaataggatgcacacaattactaaagtacagacatcctagcatttgtgtcgggctcattttgctcaacatggtatttgtggttttcagcctttctaaaagttgcatgttatgtgagtcagcttataggaagtaccaagaacagtcaaacccatggagacagaaagtagaatagtggttgccaatgtctcagggaggttgaaataggagatgaccactaattgatagaacgtttctttgtgtcgtgatgaaaactttctaaatttcagtaatggtgatggttgtaactttgcgaatatactaaacatcattgatttttaatcattttaagtgcatgaaatgtatgctttgtacatgacacttcaataaagctatccagaaaaaaaaaaaa

SEQ ID NO: 84 - DNA, 3695 bp, Homo sapiens
gccccgtcccggcctcgcgcacctgctcaggccatgatgagcttcggcggcgcggacgcgctgctgggcgccccgttcgcgccgctgcatggcggcggcagcctccactacgcgctagcccgaaagggtggcgcaggcgggacgcgctccgccgctggctcctccagcggcttccactcgtggacacggacgtccgtgagctccgtgtccgcctcgcccagccgcttccgtggcgcaggcgccgcctcaagcaccgactcgctggacacgctgagcaacgggccggagggctgcatggtggcggtggccacctcacgcagtgagaaggagcagctgcaggcgctgaacgaccgcttcgccgggtacatcgacaaggtgcggcagctggaggcgcacaaccgcagcctggagggcgaggctgcggcgctgcggcagcagcaggcgggccgctccgctatgggcgagctgtacgagcgcgaggtccgcgagatgcgcggcgcggtgctgcgcctgggcgcggcgcgcggtcagctacgcctggagcaggagcacctgctcgaggacatcgcgcacgtgcgccagcgcctagacgacgaggcccggcagcgagaggaggccgaggcggcggcccgcgcgctggcgcgcttcgcgcaggaggccgaggcggcgcgcgtggacctgcagaagaaggcgcaggcgctgcaggaggagtgcggctacctgcggcgccaccaccaggaagaggtgggcgagctgctcggccagatccagggctccggcgccgcgcaggcgcagatgcaggccgagacgcgcgacgccctgaagtgcgacgtgacgtcggcgctgcgcgagattcgcgcgcagcttgaaggccacgcggtgcagagcacgctgcagtccgaggagtggttccgagtgaggctggaccgactgtcggaggcagccaaggtgaacacagacgctatgcgctcagcgcaggaggagataactgagtaccggcgtcagctgcaggccaggaccacagagctggaggcactgaaaagcaccaaggactcactggagaggcagcgctctgagctggaggaccgtcatcaggccgacattgcctcctaccaggaagccattcagcagctggacgctgagctgaggaacaccaagtgggagatggccgcccagctgcgagaataccaggacctgctcaatgtcaagatggctctggatatagagatagccgcttacagaaaactcctggaaggtgaagagtgtcggattggctttggcccaattcctttctcgcttccagaaggactccccaaaattccctctgtgtccactcacataaaggtgaaaagcgaagagaagatcaaagtggtggagaagtctgagaaagaaactgtgattgtggaggaacagacagaggagacccaagtgactgaagaagtgactgaagaagaggagaaagaggccaaagaggaggagggcaaggaggaagaagggggtgaagaagaggaggcagaagggggagaagaagaaacaaagtctcccccagcagaagaggctgcatccccagagaaggaagccaagtcaccagtaaaggaagaggcaaagtcaccggctgaggccaagtccccagagaaggaggaagcaaaatccccagccgaagtcaagtcccctgagaaggccaagtctccagcaaaggaagaggcaaagtcaccgcctgaggccaagtccccagagaaggaggaagcaaaatctccagctgaggtcaagtcccccgagaaggccaagtccccagcaaaggaagaggcaaagtcaccggctgaggccaagtctccagagaaggccaagtccccagtgaaggaagaagcaaagtcaccggctgaggccaagtccccagtgaaggaagaagcaaaatctccagctgaggtcaagtccccggaaaaggccaagtctccaacgaaggaggaagcaaagtcccctgagaaggccaagtccccagagaaggaagaggccaagtcccctgagaaggccaagtccccagtgaaggcagaagcaaagtcccctgagaaggccaagtccccagtgaaggcagaagcaaagtcccctgagaaggccaagtccccagtgaaggaagaagcaaagtcccctgagaaggccaagtccccagtgaaggaagaagcaaagtcccctgagaaggccaagtccccagtgaaggaagaagcaaagacccccgagaaggccaagtccccagtgaaggaagaagccaagtccccagagaaggccaagtccccagagaaggccaagactcttgatgtgaagtctccagaagccaagactccagcgaaggaggaagcaaggtcccctgcagacaaattccctgaaaaggccaaaagccctgtcaaggaggaggtcaagtccccagagaaggcgaaatctcccctgaaggaggatgccaaggcccctgagaaggagatcccaaaaaaggaagaggtgaagtccccagtgaaggaggaggagaagccccaggaggtgaaagtcaaagagcccccaaagaaggcagaggaagagaaagcccctgccacaccaaaaacagaggagaagaaggacagcaagaaagaggaggcacccaagaaggaggctccaaagcccaaggtggaggagaagaaggaacctgctgtcgaaaagcccaaagaatccaaagttgaagccaagaaggaagaggctgaagataagaaaaaagtccccaccccagagaaggaggctcctgccaaggtggaggtgaaggaagacgctaaacccaaagaaaagacagaggtagccaagaaggaaccagatgatgccaaggccaaggaacccagcaaaccagcagagaagaaggaggcagcaccggagaaaaaagacaccaaggaggagaaggccaagaagcctgaggagaaacccaagacagaggccaaagccaaggaagatgacaagaccctctcaaaagagcctagcaagcctaaggcagaaaaggctgaaaaatcctccagcacagaccaaaaagacagcaagcctccagagaaggccacagaagacaaggccgccaaggggaagtaaggcagggagaaaggaacatccggaacagccaaagaaactcagaagagtcccggagctcaaggatcagagtaacacaattttcactttttctgtctttatgtaagaagaaactgcttagatgacggggcctccttcttcaaacaggaatttctgttagcaatatgttagcaagagagggcactcccaggcccctgcccccaggccctccccaggcgatggacaattatgatagcttatgtagctgaatgtgatacatgccgaatgccacacgtaaacacttgactataaaaactgcccccctcctttccaaataagtgcatttattgcctctatgtgcaactgacagatgaccgcaataatgaatgagcagttagaaatacattatgcttgagatgtcttaacctattcccaaatgccttctgttttccaaaggagtggtcaagcccttgcccagagctctctattctggaagagcggtccaggtggggccggggactggccactgaattatgccagggcgcactttccactggagttcactttcaattgcttctgtgcaataaaaccaagtgcttataaaatgaaaaaaaaaaaaaaaa

SEQ ID NO: 85 - DNA, 1798 bp, Homo sapiens
agacttgaacttgaatctcgaaccactgcatctccgactctgcccagactcttcactccgcggcaccctcaaaccccagcccaggccggggcgcacaagccagccagcgcacctgcagtcctcgcccggacgcgccgcgccccctcggaaccaggctctgctccgagcagccttcgcccctcaagccagccacagtccccgccaggccgggtgggcgtcaagatgaaggcggcccgcttcgtgctgcgcagcgctggctcgctcaacggcgccggcctggtgccccgagaggtggagcatttctcgcgctacagcccgtccccgctgtccatgaagcagctactggactttggttcagaaaatgcatgtgaaagaacttcttttgcatttttgcgacaagaattgcctgtgagactcgccaacattctgaaggaaattgatatcctcccgacccaattagtaaatacctcttcagtgcaattggttaaaagctggtatatacagagcctgatggatttggtggaattccatgagaaaagcccagatgaccagaaagcattatcagactttgtagatacactcatcaaagttcgaaatagacaccataatgtagtccctacaatggcacaaggaatcatagagtataaagatgcctgtacagttgacccagtcaccaatcaaaatcttcaatatttcttggatcgattttacatgaaccgtatttctactcggatgctgatgaaccagcacattcttatatttagtgactcacagacaggaaacccaagccacattggaagcattgatcctaactgtgatgtggtagcagtggtccaagatgcctttgagtgttcaaggatgctctgtgatcagtattatttatcatctccagaattaaagcttacacaagtgaatggaaaatttccagaccaaccaattcacatcgtgtatgttccttctcacctccatcatatgctctttgaactatttaagaatgcaatgcgggcaacagttgaacaccaggaaaatcagccttcccttacaccaatagaggttattgttgtcttgggaaaagaagaccttaccattaagatttcagacagaggaggtggtgttcccctgagaattattgaccgcctctttagttatacatactccactgcaccaacgcctgtgatggataattcccggaatgctcctttggctggttttggttacggcttgccaatttctcgtctgtatgcaaagtactttcaaggagatctgaatctctactctttatcaggatatggaacagatgctatcatctacttaaaggctttgtcttctgagtctatagaaaaacttccagtttttaacaagtcagccttcaaacattatcagatgagctctgaggctgatgactggtgtatcccaagcagggaaccaaagaacctggcaaaagaagtggccatgtgaagagggacactcaggacactttacgggatcaaagtgggtctacaccagtgctgcttcctgaatgtttgtgtgtgaacccttgtttcctccaaaacaaacgacagcaacgaaaactccttaatcagaacactgatccaatgaggaatggagcttgtttctgtgacccaggagaacttagtgcaagactacaggagttaacagatggccagctccttattttttaatgtagaataactcctgagtttatatcaaatcctgaagaaataagcctcagttttccatctgtttttgataagaataagaaagggagtgagtgtgaagatggtggttagcagtttcg

SEQ ID NO: 86 - DNA, 3186 bp, Homo sapiens
gcggccgcggcggtgcagcagaggcgcctcgggcaggaggagggcggcttctgcgagggcagcctgaggtattaaaaagtgtcagcaaactgcattgaataacagacatcctaagaggggatattttccacctctataatgaagaaaagcaggagtgtgatgacggtgatggctgatgataatgttaaagattattttgaatgtagcttgagtaaatcctacagttcttccagtaacacacttgggatcgacctctggagagggagaaggtgttgctcaggaaacttacagttaccaccactgtctcaaagacagagtgaaagggcaaggactcctgagggagatggtatttccaggccgaccacactgcctttgacaacgcttccaagcattgctattacaactgtaagccaggagtgctttgatgtggaaaatggcccttccccaggtcggagtccactggatccccaggccagctcttccgctgggctggtacttcacgccacctttcctgggcacagccagcgcagagagtcatttctctacagatcagacagcgactatgacttgtcaccaaaggcgatgtcgagaaactcttctcttccaagcgagcaacacggcgatgacttgattgtaactccttttgcccaggtccttgccagcttgcgaagtgtgagaaacaacttcactatactgacaaaccttcatggtacatctaacaagaggtccccagctgctagtcagcctcctgtctccagagtcaacccacaagaagaatcttatcaaaaattagcaatggaaacgctggaggaattagactggtgtttagaccagctagagaccatacagacctaccggtctgtcagtgagatggcttctaacaagttcaaaagaatgctgaaccgggagctgacacacctctcagagatgagccgatcagggaaccaggtgtctgaatacatttcaaatactttcttagacaagcagaatgatgtggagatcccatctcctacccagaaagacagggagaaaaagaaaaagcagcagctcatgacccagataagtggagtgaagaaattaatgcatagttcaagcctaaacaatacaagcatctcacgctttggagtcaacactgaaaatgaagatcacctggccaaggagctggaagacctgaacaaatggggtcttaacatctttaatgtggctggatattctcacaatagacccctaacatgcatcatgtatgctatattccaggaaagagacctcctaaagacattcagaatctcatctgacacatttataacctacatgatgactttagaagaccattaccattctgacgtggcatatcacaacagcctgcacgctgctgatgtagcccagtcgacccatgttctcctttctacaccagcattagacgctgtcttcacagatttggagatcctggctgccatttttgcagctgccatccatgacgttgatcatcctggagtctccaatcagtttctcatcaacacaaattcagaacttgctttgatgtataatgatgaatctgtgttggaaaatcatcaccttgctgtgggtttcaaactgctgcaagaagaacactgtgacatcttcatgaatctcaccaagaagcagcgtcagacactcaggaagatggttattgacatggtgttagcaactgatatgtctaaacatatgagcctgctggcagacctgaagacaatggtagaaacgaagaaagttacaagttcaggcgttcttctcctagacaactataccgatcgcattcaggtccttcgcaacatggtacactgtgcagacctgagcaaccccaccaagtccttggaattgtatcggcaatggacagaccgcatcatggaggaatttttccagcagggagacaaagagcgggagaggggaatggaaattagcccaatgtgtgataaacacacagcttctgtggaaaaatcccaggttggtttcatcgactacattgtccatccattgtgggagacatgggcagatttggtacagcctgatgctcaggacattctcgataccttagaagataacaggaactggtatcagagcatgatacctcaaagtccctcaccaccactggacgagcagaacagggactgccagggtctgatggagaagtttcagtttgaactgactctcgatgaggaagattctgaaggacctgagaaggagggagagggacacagctatttcagcagcacaaagacgctttgtgtgattgatccagaaaacagagattccctgggagagactgacatagacattgcaacagaagacaagtcccccgtggatacataatccccctctccctgtggagatgaacattctatccttgatgagcatgccagctatgtggtagggccagcccaccatgggggccaagacctgcacaggacaagggccacctggcctttcagttacttgagtttggagtcagaaagcaagaccaggaagcaaatagcagctcaggaaatcccacggttgacttgccttgatggcaagcttggtggagagggctgaagctgttgctgggggccgattctgatcaagacacatggcttgaaaatggaagacacaaaactgagagatcattctgcactaagtttcgggaacttatccccgacagtgactgaactcactgactaataacttcatttatgaatcttctcacttgtccctttgtctgccaacctgtgtgccttttttgtaaaacattttcatgtctttaaaatgcctgttgaatacctggagtttagtatcaacttctacacagataagctttcaaagttgacaaacttttttgactctttctggaaaagggaaagaaaatagtcttccttctttcttgggcaatatccttcactttactacagttacttttgcaaacagacagaaaggatacacttctaaccacattttacttccttcccctgttgtccagtccaactccacagtcactcttaaaacttctctctgtttgcctgcctccaacagtacttttaactttttgctgtaaacagaataaaattgaacaaattagggggtagaaaggagcagtggtgtcgttcaccgtgagagtctgcatagaactcagcagtgtgccctgctgtgtcttggaccctgcaatgcggccgc

SEQ ID NO: 87 - DNA, 1963 bp, Homo sapiens
gcgcggcgtgcaggtcgcagctgtggctcgggtgctggcaggtgctggcgggactggcggggatcgccgtggactgcctcaggggcgccgcagcccgctcggcccgagggcccgcctaaccgcgccgcccgcgcccgctcctcctcggcccgcgcccggagcgcgggggccgccggcgctgggtactcggcggccaccggggatcggggctgagcggtcggttcccgcccccgtgccgccgccgccgccttccggccgaccgcccggcttggccgctgctgccgcgtctggcccccgggtccccgccgctgggggcgcgggcggggtcgggggttgccgggcgccgccccccgtgcgcctggagtccacatcccgggcccggcggccggcgagcatggaggagaagtacctgcccgagctgatggcggagaaggactccctggacccctccttcacgcacgccctgcgcctggtgaaccaagaaatagaaaagtttcaaaaaggagaaggcaaggatgaagaaaagtacatcgatgtggtgattaataagaacatgaagctgggacagaaagtgttaattcccgtaaaacagttccctaagttcaactttgtggggaaacttttgggtccacgtggcaattctctgaagcgtttacaagaagaaaccttgacaaaaatgtccatccttgggaaaggttccatgagagacaaggccaaggaagaagagttgaggaaaagtggagaagcgaagtacttccatctcaatgatgatctccatgttctcattgaagtgtttgccccacctgcagaagcttatgccaggatgggacatgctttggaagaaatcaaaaagttcctcatccctgattataatgatgagatcaggcaagcacagctccaggagttaacatatttgaatggtggttcagaaaatgcagatgttccagtggttcgagggaaacccaccttgcgtacaagaggtgtaccagccccagcaataaccaggggaaggggaggagttacagcccggccagttggagttgtagtaccacgagggacgccaactcccagaggagtcctgtccacccgagggccagtgagtcggggaagaggacttctcactcccagagcaagaggagtccccccaactgggtacagacctccaccgccacccccgacacaagagacttatggagaatatgactatgatgatggatatggcactgcttatgatgaacagagttatgattcctatgataacagctatagcaccccagcccaaagtggtgctgattactatgattacggacatggactcagtgaggagacttatgattcctacgggcaagaagagtggactaactcaagacacaaggcaccttcagcgaggacagcaaagggcgtctacagagaccagccatatggcagatactgattgtactgtctgatgttgtgaaatagccaatctccaccagtcctgtatactgttcaaagtaatttttttctatgaacaatccctttttaaataaatcaaaatgcttaaaatctgaatggatggaacttaaaactactttgttgaaacatcaacctgggcagaaaaaaagaaaaaaagacatgtaaaattttgttatttccagtctgtatatgaaaaaataggtcatcaaaaggaaaaaaaataactttgattaactagtgttaaacaaaaaataggtttactaaatatgttaatctattcttttaacataagcctcacctttcattttaaaggtttccatagaatttagttattttatctttcagccatatgctagtttttttttctcttgccaacatgcgtaaaaagggaagccaattacaagtgcaaataatgtggtattcttttgtaactcaagtcttgaaatgttctgtagtgttaagcaaagtctcctcttgcttgatactaaataaacttttgaaaaaaaaa

SEQ ID NO: 88 - DNA, 946 bp, Homo sapiens
  misc_feature (5)..(5): n is a, c, g, or t
  misc_feature (30)..(30): n is a, c, g, or t
  misc_feature (441)..(441): n is a, c, g, or t
  misc_feature (509)..(509): n is a, c, g, or t
  misc_feature (539)..(539): n is a, c, g, or t
  misc_feature (545)..(545): n is a, c, g, or t
  misc_feature (566)..(567): n is a, c, g, or t
  misc_feature (576)..(576): n is a, c, g, or t
  misc_feature (652)..(652): n is a, c, g, or t
  misc_feature (700)..(700): n is a, c, g, or t
cccgngctgcaggaattcggcacgaggganaacatagttgtggagaaggccccagtgcagaatgaagcccccgctttaggaggtggtgaataccaggagcctggaggaaatgttaaaggggtttgggctccacctgccccgggttttggagaggatgtgcccaataggcttgtcgataacattgatatgatagatggagatggagatgatatggaacggttcatggaggagatgagagagctaaggaggaaaattagggaacttcagttgaggtacagtctgcgcattcttataggggaccctcctcaccatgatcatcatgatgagttttgccttatgccttgaatcttgaggttaataatcataaaatccctgctttctaaattcgcatttttcctggtgtacctttaatgtgaaccttttggcattcttctgcaattntctgattggagatttgcatttgacctagtctgtaagttcttctgtcagaagaggactttcatcaactntcatggaaagatgtttattgcatactgtanagttantaaagcaatttataagcatannaataaaaanattaaaaaaataaactggcgtcgtttacacgtcggactggaaaccctgcgtaccaactaatcgcttgagacatccnctttgcaagtggctataccataggccggacgatcgctttcaacattgncagctgatgcaattgaaatgtaccgtatatttgtaaatttcggtaattttgtaaatagtcattttaccaatagccgaatggaaatccttttaataagaatgacggattggttatgttttcccttgacacaacccctttaagacggcctcaactaaggcgataccgtttaggggagcccttcgaccatcctataaagtttgggtcgggccaaacctaattgacttaggagccctttacttgcggaaa

SEQ ID NO: 89 - DNA, 3130 bp, Homo sapiens
gaattcccaatacttgttgcaataattgcccacgatagctgctcaaacaagagagttggaattcatctgtaaaaatcactacatgtaacgtaggagacaagaaaaatattaatgacagaagatctgcgaacatgatgcacgtgaataattttccctttagaaggcattcctggatatgttttgatgtggacaatggcacatctgcgggacggagtcccttggatcccatgaccagcccaggatccgggctaattctccaagcaaattttgtccacagtcaacgacgggagtccttcctgtatcgatccgacagcgattatgacctctctccaaagtctatgtcccggaactcctccattgccagtgatatacacggagatgacttgattgtgactccatttgctcaggtcttggccagtctgcgaactgtacgaaacaactttgctgcattaactaatttgcaagatcgagcacctagcaaaagatcacccatgtgcaaccaaccatccatcaacaaagccaccataacagaggaggcctaccagaaactggccagcgagaccctggaggagctggactggtgtctggaccagctagagaccctacagaccaggcactccgtcagtgagatggcctccaacaagtttaaaaggatgcttaatcgggagctcacccatctctctgaaatgagtcggtctggaaatcaagtgtcagagtttatatcaaacacattcttagataagcaacatgaagtggaaattccttctccaactcagaaggaaaaggagaaaaagaaaagaccaatgtctcagatcagtggagtcaagaaattgatgcacagctctagtctgactaattcaagtatcccaaggtttggagttaaaactgaacaagaagatgtccttgccaaggaactagaagatgtgaacaaatggggtcttcatgttttcagaatagcagagttgtctggtaaccggcccttgactgttatcatgcacaccatttttcaggaacgggatttattaaaaacatttaaaattccagtagatactttaattacatatcttatgactctcgaagaccattaccatgctgatgtggcctatcacaacaatatccatgctgcagatgttgtccagtctactcatgtgctattatctacacctgctttggaggctgtgtttacagatttggagattcttgcagcaatttttgccagtgcaatacatgatgtagatcatcctggtgtgtccaatcaatttctgatcaatacaaactctgaacttgccttgatgtacaatgattcctcagtcttagagaaccatcatttggctgtgggctttaaattgcttcaggaagaaaactgtgacattttccagaatttgaccaaaaaacaaagacaatctttaaggaaaatggtcattgacatcgtacttgcaacagatatgtcaaaacacatgaatctactggctgatttgaagactatggttgaaactaagaaagtgacaagctctggagttcttcttcttgataattattccgataggattcaggttcttcagaatatggtgcactgtgcagatctgagcaacccaacaaagcctctccagctgtaccgccagtggacggaccggataatggaggagttcttccgccaaggagaccgagagagggaacgtggcatggagataagccccatgtgtgacaagcacaatgcttccgtggaaaaatcacaggtgggcttcatagactatattgttcatcccctctgggagacatgggcagacctcgtccaccctgacgcccaggatattttggacactttggaggacaatcgtgaatggtaccagagcacaatccctcagagcccctctcctgcacctgatgacccagaggagggccggcagggtcaaactgagaaattccagtttgaactaactttagaggaagatggtgagtcagacacggaaaaggacagtggcagtcaagtggaagaagacactagctgcagtgactccaagactctttgtactcaagactcagagtctactgaaattccccttgatgaacaggttgaagaggaggcagtaggggaagaagaggaaagccagcctgaagcctgtgtcatagatgatcgttctcctgacacgtaacagtgcaaaaactttcatgccttttttttttttaagtagaaaaattgtttccaaagtgcatgtcacatgccacaaccacggtcacacctcactgtcatctgccaggacgtttgttgaacaaaactgaccttgactactcagtccagcgctcaggaatatcgtaaccagttttttcacctccatgttcatccgagcaaggtggacatcttcacgaacagcgtttttaacaagatttcagcttggtagagctgacaaagcagataaaatctactccaaattattttcaagagagtgtgactcatcaggcagcccaaaagtttattggacttggggtttctattcctttttatttgtttgcaatattttcagaagaaaggcattgcacagagtgaacttaatggacgaagcaacaaatatgtcaagaacaggacatagcacgaatctgttaccagtaggaggaggatgagccacagaaattgcataattttctaatttcaagtcttcctgatacatgactgaatagtgtggttcagtgagctgcactgacctctacattttgtatgatatgtaaaacagattttttgtagagcttacttttattattaaatgtattgaggtattatatttaaaaaaaactatgttcagaacttcatctgccactggttatttttttctaaggagtaacttgcaagttttcagtacaaatctgtgctacactggataaaaatctaatttatgaattttacttgcaccttatagttcatagcaattaactgatttgtagtgattcattgtttgttttatataccaatgacttccatattttaaaagagaaaaacaactttatgttgcaggaaaccctttttgtaagtctttattatttactttgcattttgtttcactctttccagataagcagagttgctcttcaccagtgtttttcttcatgtgcaaagtgactatttgttctataatac

SEQ ID NO: 90 - DNA, 1163 bp, Homo sapiens
agatccagcaggtgcgcgaaaccgcggcgcgccgccctccgccgttatatgaggccccgctccggccccacgcggaacccgcggctccgagccttcgccggcgtcccgacccgaggccggacccgaggccagtcccgccgctgcgcagccgaagccagtgcggggcctgagagggacgcgcgccccggggcccccgccgcgggcaccatgggcgctgcccactccgcgtctgaggaggtgcgggagctcgagggcaagaccggcttctcatcggatcagatcgagcagctccatcggagatttaagcagctgagtggagatcagcctaccattcgcaaggagaacttcaacaatgtcccggacctggagctcaaccccatccgatccaaaattgttcgtgccttcttcgacaacaggaacctgcgcaagggacccagtggcctggctgatgagatcaatttcgaggacttcctgaccatcatgtcctacttccggcccatcgacaccaccatggacgaggaacaggtggagctgtcccggaaggagaagctgagatttctgttccacatgtacgactcggacagcgacggccgcatcactctggaagaatatcgaaatgtaaagtggtcgaggagctgctgtcgggaaaccctcacatctagaaggagtccgctcgctccatcgccgacggggccatgatggaggcggccagcgtgtgcatggggcagatggagcctgatcaggtgtacgaggggatcaccttcgaggacttcctgaagatctggcaggggatcgacattgagaccaagatgcacgtccgcttccttaacatggaaaccatggccctctgccactgacccaccgccacctccgcggagagactgcactttgcaatggggccgcctccccgcgtagctggagcagcccaggcccggcggacagcctcttcctgcagcgccggtacatagccaaggctcgtctgcgcaccttgtgtcttgtagggtatggtatgtgggacttcgctgtttttatctccaataaaaaaaaaaaaaaaaggtttgttaattaaaaaaaaaaaaaaaaagaaaaaaaaaaaaaaaaaaaaaaaaaaaaaagaaaaaaaaaaaaaaaaaaaaaaaaaaaaaaaaaaaaaaaaaaaaaaa

SEQ ID NO: 91 - DNA, 440 bp, Homo sapiens
  misc_feature (278)..(278): n is a, c, g, or t
  misc_feature (388)..(388): n is a, c, g, or t
  misc_feature (406)..(406): n is a, c, g, or t
gttcttgaattgctttccctatagattaattacaattggatttcatcatttaaaaaccatacttgtatatgtagttataatatgtaaggaatacattgtttataaccagtatgtacttcaaaaatgtgtattgtcaaacatacctaactttcttgcaataaatgcaaaagaaactggaacttgacaattataaatagtaatagtgaagaaaaaatagaaaggttgcaattatataggccatgggtggctcaaaactttgaacatttgagcttaaacanatgccactctcatgcattctaaattaaaaagttaaaatgattaatagttcaggtggaagaaataagcatactttttgggttttctacacattttgtgtagacaattttantgtccagtgctgctgtgnactaaagtatgtcctttatggctcaaagtttaat

SEQ ID NO: 92 - DNA, 582 bp, Homo sapiens
  misc_feature (170)..(170): n is a, c, g, or t
  misc_feature (273)..(273): n is a, c, g, or t
  misc_feature (470)..(470): n is a, c, g, or t
  misc_feature (475)..(475): n is a, c, g, or t
  misc_feature (481)..(481): n is a, c, g, or t
  misc_feature (535)..(535): n is a, c, g, or t
tttttttttttgactttaaatgaataaacttttattctgaatatactgtttttgccacaagatttaacacaacatttttctgggattataaatattttataacagtattatacaaatttttacaaaatgtttttatcaggctaggtaattttcacaaaagtgtcaagagnaacaaaataaaggggagaaaagatctattgttcacaaaagccagttggccttttgcatgaatgcacaccattttaataaaagtattcctaaaagcatgatccnacactcatacaacacaacaaaaaggacagctttactaggtcacattataaactcaactggcatctacacaagacagtatcccattagtttcagtggaatttgaggataactgtgtgaactggaaataaggtaggatgaagagttgtctaattcttcaaaaatctggaatttttttcaacactcaaaacattatattnggttnctcttnacagaaatgtactgtgaatattgacatctgctatggggaccaatccaggttggntgaaaaatatttaaattttggcaggtgaatggtattcatctatcttt

SEQ ID NO: 93 - DNA, 2242 bp, Homo sapiens
cccgcccacttccaactaccgcctccggcctgcccagggagagagagggagtggagcccagggagagggagcgcgagagagggagggaggaggggacggtgctttggctgacttttttttaaaagagggtgggggtggggggtgattgctggtcgtttgttgtggctgttaaattttaaactgccatgcactcggcttccagtatgctgggagcggtgaagatggaagggcacgagccgtccgactggagcagctactatgcagagcccgagggctactcctccgtgagcaacatgaacgccggcctggggatgaacggcatgaacacgtacatgagcatgtcggcggccgccatgggcagcggctcgggcaacatgagcgcgggctccatgaacatgtcgtcgtacgtgggcgctggcatgagcccgtccctggcggggatgtcccccggcgcgggcgccatggcgggcatgggcggctcggccggggcggccggcgtggcgggcatggggccgcacttgagtcccagcctgagcccgctcggggggcaggcggccggggccatgggcggcctggccccctacgccaacatgaactccatgagccccatgtacgggcaggcgggcctgagccgcgcccgcgaccccaagacctacaggcgcagctacacgcacgcaaagccgccctactcgtacatctcgctcatcaccatggccatccagcagagccccaacaagatgctgacgctgagcgagatctaccagtggatcatggacctcttccccttctaccggcagaaccagcagcgctggcagaactccatccgccactcgctctccttcaacgactgtttcctgaaggtgccccgctcgcccgacaagcccggcaagggctccttctggaccctgcaccctgactcgggcaacatgttcgagaacggctgctacctgcgccgccagaagcgcttcaagtgcgagaagcagctggcgctgaaggaggccgcaggcgccgccggcagcggcaagaaggcggccgccggagcccaggcctcacaggctcaactcggggaggccgccgggccggcctccgagactccggcgggcaccgagtcgcctcactcgagcgcctccccgtgccaggagcacaagcgagggggcctgggagagctgaaggggacgccggctgcggcgctgagccccccagagccggcgccctctcccgggcagcagcagcaggccgcggcccacctgctgggcccgccccaccacccgggcctgccgcctgaggcccacctgaagccggaacaccactacgccttcaaccacccgttctccatcaacaacctcatgtcctcggagcagcagcaccaccacagccaccaccaccaccaaccccacaaaatggacctcaaggcctacgaacaggtgatgcactaccccggctacggttcccccatgcctggcagcttggccatgggcccggtcacgaacaaaacgggcctggacgcctcgcccctggccgcagatacctcctactaccagggggtgtactcccggcccattatgaactcctcttaagaagacgacggcttcaggcccggctaactctggcaccccggatcgaggacaagtgagagagcaagtgggggtcgagactttggggagacggtgttgcagagacgcaagggagaagaaatccataacacccccaccccaacacccccaagacagcagtcttcttcacccgctgcagccgttccgtcccaaacagagggccacacagataccccacgttctatataaggaggaaaacgggaaagaatataaagttaaaaaaaagcctccggtttccactactgtgtagactcctgcttcttcaagcacctgcagattctgatttttttgttgttgttgttctcctccattgctgttgttgcagggaagtcttacttaaaaaaaaaaaaaaattttgtgagtgactcggtgtaaaaccatgtagttttaacagaaccagagggttgtactattgtttaaaaacaggaaaaaaaataatgtaagggtctgttgtaaatgaccaagaaaaagaaaaaaaaagcattcccaatcttgacacggtgaaatccaggtctcgggtccgattaatttatggtttctgcgtgctttatttatggcttataaatgtgtattctggctgcaagggccagagttccacaaatctatattaaagtgttatacccggtttt

SEQ ID NO: 94 - DNA, 3958 bp, Homo sapiens
ttttttttttttttttgcttaaaaaaaagccatgacggctctcccacaattcatcttccctgcgccatctttgtattatttctaatttattttggatgtcaaaaggcactgatgaagatattttctctggagtctccttctttctaacccggctctcccgatgtgaaccgagccgtcgtccgcccgccgccgccgccgccgccgccgccgcccgccccgcagcccaccatgtctcgccgcaagcaaggcaaaccccagcacttaagcaaacgggaattctcgcccgagcctcttgaagccattcttacagatgatgaaccagaccacggcccgttgggagctccagaaggggatcatgacctcctcacctgtgggcagtgccagatgaacttcccattgggggacattcttatttttatcgagcacaaacggaaacaatgcaatggcagcctctgcttagaaaaagctgtggataagccaccttccccttcaccaatcgagatgaaaaaagcatccaatcccgtggaggttggcatccaggtcacgccagaggatgacgattgtttatcaacgtcatctagaggaatttgccccaaacaggaacacatagcagataaacttctgcactggaggggcctctcctcccctcgttctgcacatggagctctaatccccacgcctgggatgagtgcagaatatgccccgcagggtatttgtaaagatgagcccagcagctacacatgtacaacttgcaaacagccattcaccagtgcatggtttctcttgcaacacgcacagaacactcatggattaagaatctacttagaaagcgaacacggaagtcccctgaccccgcgggttggtatcccttcaggactaggtgcagaatgtccttcccagccacctctccatgggattcatattgcagacaataacccctttaacctgctaagaataccaggatcagtatcgagagaggcttccggcctggcagaagggcgctttccacccactccccccctgtttagtccaccaccgagacatcacttggacccccaccgcatagagcgcctgggggcggaagagatggccctggccacccatcacccgagtgcctttgacagggtgctgcggttgaatccaatggctatggagcctcccgccatggatttctctaggagacttagagagctggcagggaacacgtctagcccaccgctgtccccaggccggcccagccctatgcaaaggttactgcaaccattccagccaggtagcaagccgcccttcctggcgacgccccccctccctcctctgcaatccgcccctcctccctcccagcccccggtcaagtccaagtcatgcgagttctgcggcaagacgttcaaatttcagagcaacctggtggtgcaccggcgcagccacacgggcgagaagccctacaagtgcaacctgtgcgaccacgcgtgcacccaggccagcaagctgaagcgccacatgaagacgcacatgcacaaatcgtcccccatgacggtcaagtccgacgacggtctctccaccgccagctccccggaacccggcaccagcgacttggtgggcagcgccagcagcgcgctcaagtccgtggtggccaagttcaagagcgagaacgaccccaacctgatcccggagaacggggacgaggaggaagaggaggacgacgaggaagaggaagaagaggaggaagaggaggaggaggagctgacggagagcgagagggtggactacggcttcgggctgagcctggaggcggcgcgccaccacgagaacagctcgcggggcgcggtcgtgggcgtgggcgacgagagccgcgccctgcccgacgtcatgcagggcatggtgctcagctccatgcagcacttcagcgaggccttccaccaggtcctgggcgagaagcataagcgcggccacctggccgaggccgagggccacagggacacttgcgacgaagactcggtggccggcgagtcggaccgcatagacgatggcactgttaatggccgcggctgctccccgggcgagtcggcctcggggggcctgtccaaaaagctgctgctgggcagccccagctcgctgagccccttctctaagcgcatcaagctcgagaaggagttcgacctgcccccggccgcgatgcccaacacggagaacgtgtactcgcagtggctcgccggctacgcggcctccaggcagctcaaagatcccttccttagcttcggagactccagacaatcgccttttgcctcctcgtcggagcactcctcggagaacgggagcttgcgcttctccacaccgcccggggagctggacggagggatctcggggcgcagcggcacgggaagtggagggagcacgccccatattagtggtccgggcccgggcaggcccagctcaaaagagggcagacgcagcgacacttgttcttcacacacccccattcggcgtagtacccagagagctcaagatgtgtggcagttttcggatggaagctcgagagcccttaagttctgagaaaatttgaagcccccaggggtggggtggacgcgtgccgcccagtcgacgtcagcgtggtctgtcatcctgctagtttgtgatgttttctgacagtagcctccaagaagccgttgtgcgaagacagagtcctgcagagtccttccagcctaggcctgcagcgccattttatttatattttttaataaaaagtaaaaacaaaaaaacagacccacattggaacagtgaatcagtcccatagagagggcccgtggaccatcgctgtcatgagtgatgccctggcccttctgaaaccagccaacctaattacctgtattgtggaaatgcgcatgagtccccaaccccttgtttctatacattctatgttgtcttttaaaaagtgtgcttaacattgacacaataaatgttggagctttaggtggtgtttgcttgttctttaatttttaatgcttataagacaatgaggctgcttatgattttgtacttctgtacctgtttcctacagacacccatcgggtgggtaggaggaacagatttgagaaatgggcaggagatgtaggaggggaactaggttaccgcttatcagatggcataaattttcaaggagaatcaaaatgcaaaacttgggaataaatcatagcaatatcataattaatgtagtagtaatattgctgtttattaatgctgaagtgtggttttcctaactgtctgacttataatttgcataccattaaataatgcataatatggcacgccgaatcctgtttttcaaatatatgcttttggtggctaccatgcaggatttgaatttgtcttttaatttagcttaggaaagaacatcactgggcgagcggtaaatcctaaagaaggtgataaatgtcagtagtttcttattaaatattctaattttaggttcccaaaccttcaggaaatatatcttaatgcagacaaacaaacataaaacttctttagtacttacatcaggaaatttggggcagattttagaggggggaaattataggaggaaagaagttcacatcagaacagacaatcacagcaatgctctattccttagaaattagtgccacaaataagttacatctacaaacaggtggtaaaaattctttctggcccagttaatttgcacagaacttttctcagtttggtattttttactgcttggagatccagaagagaattagaaacaacatagcaaattaaaataggtttgtcaataatagagctcagacacctgtgtgctgtagattcacatacaggccgtgaacctaagtggggaaaatcctacctatccaccttctggctagattacctagcttagtgaaaagatagccaaataattggcatgtgaattatttcctgcttattcataataaataatgactgtcta

SEQ ID NO: 95 - DNA, 3342 bp, Homo sapiens
gcccgagggctgccggctgccggccgagggcggccccgccaccgaccaggtgatggcccagccagggtccggctgcaaagcgaccacccgctgtcttgaagggaccgcgccgcccgccatggctcagtctgacgccgaggccctggcaggagctctggacaaggacgagggtcaggcctccccatgtacgcccagcacgccatctgtctgctcaccgccctctgccgcctcctccgtgccgtctgcaggcaagaacatctgctccagctgcggcctcgagatcctggaccgatatctgctcaaggtcaacaacctcatctggcacgtgcggtgcctcgagtgctccgtgtgtcgcacgtcgctgaggcagcagaacagctgctacatcaagaacaaggagatcttctgcaagatggactacttcagccgattcgggaccaagtgtgcccggtgcggccgacagatctacgccagcgactgggtgcggagagctcgcggcaacgcctaccacctggcctgcttcgcctgcttctcgtgcaagcgccagctgtccactggtgaggagttcggcctggtcgaggagaaggtgctctgccgcatccactacgacaccatgattgagaacctcaagagggccgccgagaacgggaacggcctcacgttggagggggcagtgccctcggaacaggacagtcaacccaagccggccaagcgcgcgcggacgtccttcaccgcggaacagctgcaggttatgcaggcgcagttcgcgcaggacaacaaccccgacgctcagacgctgcagaagctggcggacatgacgggcctcagccggagagtcatccaggtgtggtttcaaaactgccgggcgcgtcataaaaagcacacgccgcaacacccagtgccgccctcgggggcgcccccgtcccgccttccctccgccctgtccgacgacatccactacaccccgttcagcagccccgagcgggcgcgcatggtcaccctgcacggctacattgagagtcaggtacagtgcgggcaggtgcactgccggctgccttacaccgcaccccccgtccacctcaaagccgatatggatgggccgctctccaaccggggtgagaaggtcatcctttttcagtactaacgctgccggcacttccgcatctgcccgtgggcgccccacagctgcccctcagccgctgagatccagtgtccaagctgcggccaggagtccacccacctccgcatccacccccgtccgccatcctgcccaccaccaggtcggttcccgaggcctggcctttccctctcctgctgagaaccagaacccaccaggagcaccacagagtcctcctcttggaaggcagaactccctgaaatctggaatcagggtggaaacagcctgtttttcccatttaaacaggagtcctcttcaacttcagctgattacaataacaaaaggcggaattgaattgtgcgatgccaacggccttctcatttacaggtttttttcccccacattggcctttatttactacttccttggaaccatctctgaattctgaatagctgacaacccccaatgttatccactctgttgcttttgtctggaaaactctacagtgtttgtgggatgtccccaaaggaaagctatgttctaattttatcatttccatctgtctggttatgtcaagttaattcagaaagagaagagacagtgaccaaccctgagaggcctaatagggcagagatggaggcctgcccagactaggaggcagcggggatagacagggaatggggagaagaaagacccccattggtttggaaatcaaggagagggcggtgacatattggaccagaagaggcactagccattttaaggagaggaaagagaaaactctggggtcagggagagaccctacccccacctaattatccagcatatatgtaagaaacatagcagcgatggtattcgatctgtgccatgactcttctgaatgtttggacaggttagagttggggacccctgttggccacttgttgacctctcatagtggtgcttgggccaggtcttctcaatggaaggggaatcccttataggggagagggaacagagcccagtgaaatggcagtcagaatgttaaccctggatccatctctaagtagagagagggtgcccattgcctaggtgagtgtgccaagctcaggattccaactggtgcctctgagcttcccaatcaatacttcctggagccagccccacccacccctgagaacagaggtcagacacagctgcgtaacatccatcctgctacaactcttccaccccaaacaaaagggctcaggctacacacgaccatgatttatgttttcaggggatgcccatttgtcccaagcttatcctgtaattctagaattacctggtgtcctgatgcattttccactagaggttgctaatcagcatgttttagcccaagtccaccttcctgctgtggttaacctgttatgttgcttttggaaggagactctaagacagggaaagcaagttcatggtacatacgcagccattgtctctgtttttacccatggcagacattgctaatcaatggcagctctatttcactgagtctggataaggtttcagagttcaaatgcttgacgttggcacttaacatgaaagcctataggtcattcttgctctgggatctacaggcagggtaggcacaggtgcagcctaagaagggaacctgcttcctctcccttccaaagacagtgacagctgactgagggcaaagagcaggcaccactcagaacgtggtgagtacagctcagctcagcactcagtcagtggtaacttgtgcccagccctgtgctaggcgctgacattaacaggagcaaccagggcccaattcctggccttggagctcaaatctttcctttgatttttgctcctgatcatcaaggccccagtggcaaccatgtggtaagtggccaaccaagccctacccagggtcacccaacacactctgccttgagcctctcctcagggtctattccttgcgtggattatgtggccgtagcatgttacagttcaaacatgtctccactaccctgttaagagcagcctgggaacgtacaggccatcaagactatttatttaaatacaaaaaaaggggaaaacacacacacggaaaaaaaattgtaagcactttttttgtaaaaccaatgtctgttttgttacatacctttcatgtcgtgctttgtaaatgtcttatttgtgtaataaagttaatgcaagtagaagtgctggcactgaaatccagaaaaaaaaaaaaaaaaaaa

SEQ ID NO: 96 - DNA, 2581 bp, Homo sapiens
tcaaatgagaaaattgcaagtagtgtgacagagctgattgattttgttgctttcttgattttttttttcaaaatgggtttactaaaatgtagatgacttaactgcctcctccttcgtctgaaaaatgccaatattcaatcatcatgcagcattataacaagccttataagtcctaaagcattaagttgcacttttttgaggaggggtagtgcagtatttctctggccagtatgaatgaagtttatacttaccatatttgatagaaacatagatcaagctatggcacagcgactcatcagatagctagctttgacgtctgggcacaattgaaccaacttccatcgtgaatctttataatgattgactttggtgtatagtgcagtaaacaaatagtgctcctagttaagtatttgtcagcatccttttgtctctaacttgtttctatttttacagccacacaattcttggcatgtattaagaaaaaaaaaaatccctgttcaagtagtttttccacctatcagcactgagtaaatgccataaatccattgaaatggtctaaatgttccatctgttctcctgttttgccagttatatagtaatgaaatacatttgtaaattttatgcaacaaatggcaaacgtatcattattttgaaattgtgtatgtaaaagttatatttttacatgtagactcttgttattatgtgttttaatacattgtatcagtttttgtttttttttaaaaactgtggtttaaaaagaagtctcatttaaatgaaatagctacaagaatcagaattttatgttcatttctgaaaatgtaagaacaaataagatagttaccacgtggtcatcttttacaaacccataaacattttgattagctgtgtgtgtgttgaaaaactgtaaatatgttcagtagcgataaaactaaaataactttgatttgttgataagttcctaaaatgtggaggtggattaaaaccttaggagaatagcagaaatcaaacttcatgaaaagttattttggggctttcctgtgaaatgtatgaacaaagaggctcagagaaggacatggaagacaataatgtatactctctcctcctccctgaataatgaaaaccatgtgtatttgttccctccgtatgttaaagatttccttttagtggtacattctgcactcattttgtatagtctaccaaggcgggtatccctaggaacaatattatataggaagcaggtatactctgatcacattcaggataagtgtacagaagaaaatacggtgtttactctttagggaactggaaacactccctgcattgatgtacattttaagaatggcacttttgatacatgttatcataaaggtgcttaatagagctgaattaaagtttttcaaatctgtaaacaaagcaaaaaagtaaattgtagtcatttgattattttttaaattggtgctttatattttgttctcactcagagtaaaagctgcaatttattgttcaccagctttgatgtattcattactcagtaatgcaatacctctattgttgaattccctttggaaataagtgaaaattctaacggccactgaaagctgctcgctaggttttgcttggtggagaaacataatctgcacctatccatattaattgggttgtatccccattaaaaaagaaaaaaagggaatgtggcctttttagtgtgttttttattgttgttgttttgtaattatcaaacccaggtaagatattggtatcctgcactggatcttcaaatgaagttcagcagaagacagttaagattaaagtactatacaaaaatttcaaaagggtccttactacgctatctgtatgacgacacttaggctggggatctctttcagaaactcggactttaaaagcaacttggagcagttgatccacctccacattcaagtaatttatgaatatgcagaatagggatctgttcatctagaaatttttaccatttgtcttctgtgtagctgcaaggaacactaatgtttatacaactgtcagtccacccagtggtgcaactggttctgattcagtcttccgattcctttttatttttcactttttcctatttctgaatttttttttttatttgtgatcttgattttgatgaggggttggggagtggggagggagtcgaaccaagacttggagttaagaggattttcatcttttgcatccaacaggcagaatatgatctgtgtccaaaagtgaacttgagtcaggattgaatcaatttcagcataaacaagcacaaaaatttagtctgctggctgactggaagcaaaaaagtcaagatggaatatgatgaattccaacacaatggggcaccaaggcctttaggcctctctttttattttgctttggttttgtttgtttttctttagagacatgctctttctcatgggacttgaagtggactcatctttgtgcagtgctggttttgccatactcatttcaagtattatagacatatgtaatggtgaaaatatatgaactgtggcctttttcattcttgttacttgtgatgcaattaagtgaagat

SEQ ID NO: 97 - DNA, 1646 bp, Homo sapiens
cactgcgaagcccagctgcgcgcgccttgggattgactgtccacgctcgcccggctcgtccgacgcgccctccgccagccgacagacacagccgcacgcactgccgtgttctccctgcggctcggacacatagtatgaccattaggtgtttcgtctcccacccattttctatggaaaaccaaggggatcgggccatgatagccactggcagctttgaagaacgggacacctttagagaagcttgatcttggaggcctcaccgtgagaccttacaaagccggattccggcagagttcctctatctcgtcttgttgctgattaaaggtgcccctgtctccagtttttctccatctcctgggacgtagcaggaaatcagcatcatggttgggttcaaggccacagatgtgccccctactgccactgtgaagtttcttggggctggcacagctgcctgcatcgcagatctcatcacctttcctctggatactgctaaagtccggttacagatccaaggagaaagtcaggggccagtgcgcgctacagccagcgcccagtaccgcggtgtgatgggcaccattctgaccatggtgcgtactgagggcccccgaagcctctacaatgggctggttgccggcctgcagcgccaaatgagctttgcctctgtccgcatcggcctgtatgattctgtcaaacagttctacaccaagggctctgagcatgccagcattgggagccgcctcctagcaggcagcaccacaggtgccctggctgtggctgtggcccagcccacggatgtggtaaaggtccgattccaagctcaggcccgggctggaggtggtcggagataccaaagcaccgtcaatgcctacaagaccattgcccgagaggaagggttccggggcctctggaaagggacctctcccaatgttgctcgtaatgccattgtcaactgtgctgagctggtgacctatgacctcatcaaggatgccctcctgaaagccaacctcatgacagatgacctcccttgccacttcacttctgcctttggggcaggcttctgcaccactgtcatcgcctcccctgtagacgtggtcaagacgagatacatgaactctgccctgggccagtacagtagcgctggccactgtgcccttaccatgctccagaaggaggggccccgagccttctacaaagggttcatgccctcctttctccgcttgggttcctggaacgtggtgatgttcgtcacctatgagcagctgaaacgagccctcatggctgcctgcacttcccgagaggctcccttctgagcctctcctgctgctgacctgatcacctctggctttgtctctagccgggccatgctttccttttcttccttctttctcttccctccttcccttctctccttccctctttccccacctcttccttccgctcctttacctaccaccttccctctttctacattctcatctactcattgtctcagtgctggtggagttgacatttgacagtgtgggaggcctcgtaccagccaggatcccaagcgtcccgtcccttggaaagttcagccagaatcttcgtcctgcccccgacagcccagcctagcccacttgtcatccataaagcaagctcaaccttgg

SEQ ID NO: 98 - DNA, 1587 bp, Homo sapiens
gccggggggaggggccggggcggtggcggctgtggccggtactggacccggcgggatgagcgaggtggaggcggcagcggtggctacagcggtccccgcggcgacggtgcccgcgacggcggcaggggtggtagcggtggtggtaccggtgcccgcaggggagccgcagaaaggcggcggggcgggcggcgggggcggagccgcctcgggccccgctgctgggaccccctcggcgccgggctcccgcacccctggcaatccggcgacggcggtctcgggaacccccgcccccccggcccggagtcaggcggacaagccggtgctggcaatccaagtcctgggcactgtcaaatggttcaacgtccggaatggttacggattcatcaacaggaatgacaccaaggaagatgtctttgttcaccagacagctattaaaagaaacaaccccaggaagtttctgcgcagcgttggagatggggagactgtggaatttgatgtcgtggaaggagagaagggcgcagaagccactaatgtaactgggcctgggggagtacccgtgaagggcagccgttatgcccccaaccgacgtaagtcccgccgattcatcccccggcctccctcagttgccccaccacccatggtggcagagatcccctcggcggggacaggacctggcagtaaaggggagcgggctgaagactctgggcaacggccccgacgatggtgccccccacccttcttctaccgacggcggtttgtgcgaggcccccggcctcccaaccagcagcagcctatagagggcactgacagggtagaacccaaagagacagccccattggaggggcaccaacagcagggagatgagcgagtccccccgcccagattccggcccaggtaccgaaggcctttccgccccaggccacgccagcagcctaccacagaaggtggggatggtgagaccaagcccagccaaggtcccgctgatggttcccggcctgagccccagcgcccacgaaaccgcccctacttccagcggagacggcagcaggcccctggcccccagcaggcccctggcccccggcagcccgcagcccctgagacctcagcccctgtcaacagtggggaccccaccaccaccatcctggagtgattccaactcaactcaaaggacacccagagctgccatctggtatctgccagtttttccaaatgacctgtaccctacccagtaccctgctccccctttcccataattcatgacatcaaaacaccagcttttcaccttttccttgagactcaggaggaccaaagcagcagccttttgctttttcttttttcttccctccccttatcaagggttgaaggaagggagccatccttactgttcagagacagcaactccctcccgtaactcaggctgagaaggaaccagccagctcttacctcctcctggttgcttttcttgcccccaccccaagtttatttttgttttcccccggccccctacctctgaagccattttatgatctgtcatgtgccacctgagcctccagtaaaaacaaaaacaggccaaaaaaaaaaaaaaaa

SEQ ID NO: 99 - DNA, 4767 bp, Homo sapiens
gcctcccgccgcctcccgcgcggccatggactgagcgccgccggccaggccgcggggatggggccgccgctcccgctgctgctgctgctactgctgctgctgccgccacgcgtcctgcctgccgccccttcgtccgtcccccgcggccggcagctcccggggcgtctgggctgcctgctcgaggagggcctctgcggagcgtccgaggcctgtgtgaacgatggagtgtttggaaggtgccagaaggttccggcaatggacttttaccgctacgaggtgtcgcccgtggccctgcagcgcctgcgcgtggcgttgcagaagctttccggcacaggtttcacgtggcaggatgactatactcagtatgtgatggaccaggaacttgcagacctcccgaaaacctacctgaggcgtcctgaagcatccagcccagccaggccctcaaaacacagcgttggcagcgagaggaggtacagtcgggagggcggtgctgccctggccaacgccctccgacgccacctgcccttcctggaggccctgtcccaggccccagcctcagacgtgctcgccaggacccatacggcgcaggacagaccccccgctgagggtgatgaccgcttctccgagagcatcctgacctatgtggcccacacgtctgcgctgacctaccctcccgggccccggacccagctccgcgaggacctcctgccgcggaccctcggccagctccagccagatgagctcagccctaaggtggacagtggtgtggacagacaccatctgatggcggccctcagtgcctatgctgcccagaggcccccagctccccccggggagggcagcctggagccacagtaccttctgcgtgcaccctcaagaatgcccaggcctttgctggcaccagccgccccccagaagtggccttcacctctgggagattccgaagacccctccagcacaggcgatggagcacggattcataccctcctgaaggacctgcagaggcagccggctgaggtgaggggcctgagtggcctggagctggacggcatggctgagctgatggctggcctgatgcaaggcgtggaccatggagtagctcgaggcagccctgggagagcggccctgggagagtctggagaacaggcggatggccccaaggccaccctccgtggagacagctttccagatgacggagtgcaggacgacgatgatagactttaccaagaggtccatcgtctgagtgccacactcgggggcctcctgcaggaccacgggtctcgactcttacctggagccctcccctttgcaaggcccctcgacatggagaggaagaagtccgagcaccctgagtcttccctgtcttcagaagaggagactgccggagtggagaacgtcaagagccagacgtattccaaagatctgctggggcagcagccgcattcggagcccggggccgctgcgtttggggagctccaaaaccagatgcctgggccctcgaaggaggagcagagccttccagcgggtgctcaggaggccctcagcgacggcctgcaattggaggtccagccttccgaggaagaggcgcggggctacatcgtgacagacagagaccccctgcgccccgaggaaggaaggcggctggtggaggacgtcgcccgcctcctgcaggtgcccagcagtgcgttcgctgacgtggaggttctcggaccagcagtgaccttcaaagtgagcgccaatgtccaaaacgtgaccactgaggatgtggagaaggccacagttgacaacaaagacaaactggaggaaacctctggactgaaaattcttcaaaccggagtcgggtcgaaaagcaaactcaagttcctgcctcctcaggcggagcaagaagactccaccaagttcatcgcgctcaccctggtctccctcgcctgcatcctgggcgtcctcctggcctctggcctcatctactgcctccgccatagctctcagcacaggctgaaggagaagctctcgggactagggggcgacccaggtgcagatgccactgccgcctaccaggagctgtgccgccagcgtatggccacgcggccaccagaccgacctgagggcccgcacacgtcacgcatcagcagcgtctcatcccagttcagcgacgggccgatccccagcccctccgcacgcagcagcgcctcatcctggtccgaggagcctgtgcagtccaacatggacatctccaccggccacatgatcctgtcctacatggaggaccacctgaagaacaagaaccggctggagaaggagtgggaagcgctgtgcgcctaccaggcggagcccaacagctcgttcgtggcccagagggaggagaacgtgcccaagaaccgctccctggctgtgctgacctatgaccactcccgggtcctgctgaaggcggagaacagccacagccactcagactacatcaacgctagccccatcatggatcacgacccgaggaaccccgcgtacatcgccacccagggaccgctgcccgccaccgtggctgacttttggcagatggtgtgggagagcggctgcgtggtgatcgtcatgctgacacccctcgcggagaacggcgtccggcagtgctaccactactggccggatgaaggctccaatctctaccacatctatgaggtgaacctggtctccgagcacatctggtgtgaggacttcctggtgaggagcttctatctgaagaacctgcagaccaacgagacgcgcaccgtgacgcagttccacttcctgagttggtatgaccgaggagtcccttcctcctcaaggtccctcctggacttccgcagaaaagtaaacaagtgctacaggggccgttcttgtccaataattgttcattgcagtgacggtgcaggccggagcggcacctacgtcctgatcgacatggttctcaacaagatggccaaaggtgctaaagagattgatatcgcagcgaccctggagcacttgagggaccagagacccggcatggtccagacgaaggagcagtttgagttcgcgctgacagccgtggctgaggaggtgaacgccatcctcaaggcccttccccagtgagcggcagcctcaggggcctcaggggagcccccaccccacggatgttgtcaggaatcatgatctgactttaattgtgtgtcttctattataactgcatagtaatagggcccttagctctcccgtagtcagcgcagtttagcagttaaaagtgtatttttgtttaatcaaacaataataaagagagatttgtggaaaaatccagttacgggtggaggggaatcggttcatcaattttcacttgcttaaaaaaaatactttttcttaaagcacccgttcaccttcttggttgaagttgtgttaacaatgcagtagccagcacgttcgaggcggtttccaggaagagtgtgcttgtcatctgccactttcgggagggtggatccactgtgcaggagtggccggggaagctggcagcactcagtgaggccgcccggcacacaaggcacgtttggcatttctctttgagagagtttatcattgggagaagccgcggggacagaactgaacgtcctgcagcttcggggcaagtgagacaatcacagctcctcgctgcgtctccatcaacactgcgccgggtaccatggacggccccgtcagccacacctgtcagcccaagcagagtgattcaggggctccccgggggcagacacctgtgcaccccatgagtagtgcccacttgaggctggcactcccctgacctcacctttgcaaagttacagatgcaccccaacattgagatgtgtttttaatgttaaaatattgatttctacgttatgaaaacagatgcccccgtgaatgcttacctgtgagataaccacaaccaggaagaacaaatctgggcattgagcaagctatgagggtccccgggagcacacgaaccctgccaggcccccgctggctcctccaggcacgtcccggacctgtggggccccagagaggggacatttccctcctgggagagaaggagatcagggcaactcggagagggctgcgagcatttccctcccgggagaggagatcagggcgacctgcacgcactgcgtagagcctggaagggaagtgagaaaccagccgaccggccctgcccctcttcccgggatcacttaatgaaccacgtgttttgacatcatgtaaacctaagcacgtagagatgattcggatttgacaaaataacatttgagtatccgattcgccatcaccccctaccccagaaataggacaattcacttcattgaccaggatgatcacatggaaggcggcgcagaggcagctgtgtgggctgcagatttcctgtgtggggttcagcgtagaaaacgcacctccatcccgcccttcccacagcattcctccatcttagatagatggtactctccaaaggccctaccagagggaacacggcctactgagcggacagaatgatgccaaaatattgcttatgtctctacatggtattgtaatgaatatctgctttaatatagctatcatttcttttccaaaattacttctctctatctggaatttaattaatcgaaatgaatttatctgaatataggaagcatatgcctacttgtaatttctaactccttatgtttgaagagaaacctccggtgtgagatatacaaatatatttaattgtgtcatattaaacttctgattcaaaaaaaa

SEQ ID NO: 100 - DNA, 535 bp, Homo sapiens
tttttttttttaatgttaaaaatatttattttttttcctaaaagatcacacaaaagttgggaagagaaggatgtcaattagactacatcaaaatctgggcagagggaggacaaagagctgcctaaagaaactggtagctggagcaaactgcagagatcaagatgaccctagtcaacggaaccagcagcccaggtcagccacattcaggagcaccaccgaggcacggcagggagagcaaagttgctggccccaatcattcctccttttcagggcaggagaggcagaagctcactctttagacatgttcttgatggtcttgtgctctttcatggccttctcccaatcgctgccattgaattcctcagtgaccatactccgcacagtgccctcatccaggcagtggggggcaattccgaagcctccggggtttgatcgtggagtatagaagctctgaacgccacatctcttacagaaggtatgctgggctttgtgagtattgaacgtgtaagtcgttatgtgctcagctcccttcagg

SEQ ID NO: 101 - DNA, 2443 bp, Homo sapiens
aaatggcgtgcccgtctctccgccggccccctgcctcgcagtggtttctcctgcagctcccctgggctccgcggccagtagtgcagcccgtggagccgcggctttgcccgtctcctctgggtggccccagtgcgcgggctgacactcattcagccggggaaggtgaggcgagtagaggctggtgcggaacttgccgcccccagcagcgccggcgggctaagcccagggccgggcagacaaaagaggccgcccgcgtaggaaggcacggccggcggcggcggagcgcagcgatggccgggcgagggggcagcgcgctgctggctctgtgcggggcactggctgcctgcgggtggctcctgggcgccgaagcccaggagcccggggcgcccgcggcgggcatgaggcggcgccggcggctgcagcaagaggacggcatctccttcgagtaccaccgctaccccgagctgcgcgaggcgctcgtgtccgtgtggctgcagtgcaccgccatcagcaggatttacacggtggggcgcagcttcgagggccgggagctcctggtcatcgagctgtccgacaaccctggcgtccatgagcctggtgagcctgaatttaaatacattgggaatatgcatgggaatgaggctgttggacgagaactgctcattttcttggcccagtacctatgcaacgaataccagaaggggaacgagacaattgtcaacctgatccacagtacccgcattcacatcatgccttccctgaacccagatggctttgagaaggcagcgtctcagcctggtgaactcaaggactggtttgtgggtcgaagcaatgcccagggaatagatctgaaccggaactttccagacctggataggatagtgtacgtgaatgagaaagaaggtggtccaaataatcatctgttgaaaaatatgaagaaaattgtggatcaaaacacaaagcttgctcctgagaccaaggctgtcattcattggattatggatattccttttgtgctttctgccaatctccatggaggagaccttgtggccaattatccatatgatgagacgcggagtggtagtgctcacgaatacagctcctccccagatgacgccattttccaaagcttggcccgggcatactcttctttcaacccggccatgtctgaccccaatcggccaccatgtcgcaagaatgatgatgacagcagctttgtagatggaaccaccaacggtggtgcttggtacagcgtacctggagggatgcaagacttcaattaccttagcagcaactgttttgagatcaccgtggagcttagctgtgagaagttcccacctgaagagactctgaagacctactgggaggataacaaaaactccctcattagctaccttgagcagatacaccgaggagttaaaggatttgtccgagaccttcaaggtaacccaattgcgaatgccaccatctccgtggaaggaatagaccacgatgttacatccgcaaaggatggtgattactggagattgcttatacctggaaactataaacttacagcctcagctccaggctatctggcaataacaaagaaagtggcagttccttacagccctgctgctggggttgattttgaactggagtcattttctgaaaggaaagaagaggagaaggaagaattgatggaatggtggaaaatgatgtcagaaactttaaatttttaaaaaggcttctagttagctgctttaaatctatctatataatgtagtatgatgtaatgtggtcttttttttagattttgtgcagttaatacttaacattgatttattttttaatcatttaaatattaatcaactttccttaaaataaatagcctcttaggtaaaaatataagaacttgatatatttcattctcttatatagtattcattttcctacctatattacacaaaaaagtatagaaaagatttaagtaattttgccatcctaggcttaaatgcaatattcctggtattatttacaatgcagaattttttgagtaattctagctttcaaaaattagtgaagttcttttactgtaattggtgacaatgtcacataatgaatgctattgaaaaggttaacagatacagctcggagttgtgagcactctactgcaagacttaaatagttcagtataaattgtcgtttttttcttgtgctgactaactataagcatgatcttgttaatgcatttttgatgggaagaaaaggtacatgtttacaaagaggttttatgaaaagaataaaaattgacttcttgcttgtacatataggagcaatactattatattatgtagtccgttaacactacttaaaagtttagggttttctcttggttgtagagtggcccagaattgcattctgaatgaataaaggttaaaaaaaaatccccagtgaaaaaaaa

SEQ ID NO: 102 - DNA, 765 bp, Homo sapiens
ccacgcgtccgggacccggcccgcgccttctgcccctgctgccggccgcgccatgcggtgagcgccccaggccgccagagcccacccgacccggcccgacgcccggacctgccgcccagacccgccaccgcacccggaccccgacgctccgaacccgggcgcagccgcagctcaagatggcccgaggcagcgccctccttctcgcctccctcctcctcgccgcggccctttctgcctctgcggggctctggtcgccggccaaggaaaaacgaggctggaccctgaacagcgcgggctacctgctgggcccacatgccgttggcaaccacaggtcattcagcgacaagaatggcctcaccagcaagcgggagctgcggcccgaagatgacatgaaaccaggaagctttgacaggtccatacctgaaaacaatatcatgcgcacaatcattgagtttctgtctttcttgcatctcaaagaggccggtgccctcgaccgcctcctggatctccccgccgcagcctcctcagaagacatcgagcggtcctgagagcctcctgggcatgtttgtctgtgtgctgtaacctgaagtcaaaccttaagataatggataatcttcggccaatttatgcagagtcagccattcctgttctctttgccttgatgttgtgttgttatcatttaagattttttttttttggtaattattttgagtggcaaaataaagaatagcaattaaaaaaaaaaaaacaaaaaaaaaaaaaaaa

SEQ ID NO: 103 - DNA, 1431 bp, Homo sapiens
atgaccatggaaacagttgaatcccagcatgatggaagtataacagcttctttgacagagagcaagtctgctcatgtgcagactcagactgggcaaatttcaatccctgctttagctcagtgcagtgagctgagatcaggcaccagaagaggctccccagctgtaactctagtgcagttaccttcgggccaaactatacatgtccagggagtaattcagacaccacagccatgggttattcagtcatcagaaatacacaccgttcaggtagcagcaattgcagagacagatgaatctgcagaatcagaaggtgtaattgattctcataaacgtagagaaatcctttcacgaagaccctcttataggaaaatactgaatgaactgtcctctgatgtgcctggtgttcccaagattgaagaagagagatcagaggaagaaggaacaccacctagtattgctaccatggcagtaccaactagcatatatcagactagcacggggcaatacattgctatagcccaaggtggaacaatccagatttctaacccaggatctgatggtgttcagggactgcaggcattaacaatgacaaattcaggagctcctccaccaggtgctacaattgtacagtacgcagcacaatcagctgatggcacacagcagttctttgtcccaggcagccaggttgttgttcaagctgccactggtgacatgccaacttaccagatccgagctcctactgctgctttgccacagggagtggtgatggctgcatcgcccggaagtttgcacagtccccagcagctggcagaagaagcaacacgcaaacgagagctgaggctaatgaaaaacagagaagctgcccgggagtgtcgcaggaagaagaaagaatatgtcaaatgtcttgaaaatcgtgtggctgtgcttgaaaaccaaaacaagactctcattgaggaactcaaggccctcaaagatctttattgccataaagtagagtaactgtctttgacttggaccttgtttactctaatcaaggcaggagatgcagcagtcctacttattgccatgtggacttgtgggaaggacacgtgtgacccttaagaatccagtttggattagtgtttgaaattgaattgggaatgttgttccaggatgtggaatgcagcgtgatcacacttaccgagcttactttgatctgtttgtcaatagcatgcaaaaaatgctttgtttgccctttgcttctgctttttttcagggaagctgccaaagaatgtcgacgtcgaaagaaagaatatgtaaaatgcctggagagccgagttgcagtgctggaagtccagaacaagaagcttatagaggaacttgaaaccttgaaagacatttgttctcccaaaactgattactagaaatatttaactatgaactgattacaga

SEQ ID NO: 104 - DNA, 2673 bp, Homo sapiens
gtgccgcgcccagagcagcagcaacagcgaagatgcgaggccattacctgtttgatccctgtcggaaacctggcacgggccaacttttcccgattatcacgccaagaagttgcaaggactagtcgaagactcggaggggccagggcgagggcgcgctcccccgcgcgctgcctcctccctcctccctccggccgcccgagctcccggcctctctcccgcccgcgctcactccctccgcccgcctccctcctctggccccctccgcgcggcacagggcggggggtgccgcgaaactccgacccgagccacttggacttgcacagtgtccgccgggcgcaggggccgaccgcacgcagtcgcgcagttctgcctccgcctgccagtctcgcccgcgatcccggcccggggctgtggcgtcgactccgacccaggcagccagcagcccgcgcgggagccggaccgccgccggaggagctcggacggcatgctgagccccctccttggctgaagcccgagtgcggagaagcccgggcaaacgcaggctaaggagaccaaagcggcgaagtcgcgagacagcggacaagcagcggaggagaaggaggaggaggcgaacccagagaggggcagcaaaagaagcggtggtggtgggcgtcgtggccatggcggcggctatcgccagctcgctcatccgtcagaagaggcaagcccgcgagcgcgagaaatccaacgcctgcaagtgtgtcagcagccccagcaaaggcaagaccagctgcgacaaaaacaagttaaatgtcttttcccgggtcaaactcttcggctccaagaagaggcgcagaagaagaccagagcctcagcttaagggtatagttaccaagctatacagccgacaaggctaccacttgcagctgcaggcggatggaaccattgatggcaccaaagatgaggacagcacttacactctgtttaacctcatccctgtgggtctgcgagtggtggctatccaaggagttcaaaccaagctgtacttggcaatgaacagtgagggatacttgtacacctcggaacttttcacacctgagtgcaaattcaaagaatcagtgtttgaaaattattatgtgacatattcatcaatgatataccgtcagcagcagtcaggccgagggtggtatctgggtctgaacaaagaaggagagatcatgaaaggcaaccatgtgaagaagaacaagcctgcagctcattttctgcctaaaccactgaaagtggccatgtacaaggagccatcactgcacgatctcacggagttctcccgatctggaagcgggaccccaaccaagagcagaagtgtctctggcgtgctgaacggaggcaaatccatgagccacaatgaatcaacgtagccagtgagggcaaaagaagggctctgtaacagaaccttacctccaggtgctgttgaattcttctagcagtccttcacccaaaagttcaaatttgtcagtgacatttaccaaacaaacaggcagagttcactattctatctgccattagaccttcttatcatccatactaaagccccattatttagattgagcttgtgcataagaatgccaagcattttagtgaactaaatctgagagaaggactgccaaattttctcatgatctcacctatgactttggggatgataatccaaaagtatttcacagcactaatgctgatcaaaatttgctctcccaccaagaaaatgtaaaagaccacaattgttcttcaaaaacaaacaaaacaaaacaaaacaaaattaactgcttaaatgttttgtcggggcaaacaaaattatgtgaattgtgttgttttcttggcttgatgttttctatctacgcttgattcacatgtactcttttctttggcatagtgcaactttatgatttctgaaattcaatggttctattgactttttgcgtcacttaatccaaatcaaccaaattcagggttgaatctgaattggcttctcaggctcaaggtaacagtgttcttgtggtttgaccaattgtttttctttctttttttttttttagatttgtggtattctggtcaagttattgtgctgtactttgtgcgtagaaatgtgagttgtattgtcaaccccagtcagtaaagagaacttcaaaaaattatcctcaagtgtagatttctcttaattccatttgtgtatcatgttaaactattgttgtggcttcttgtgtaaagacaggaactgtggaactgtgatgttgtcttttgtgttgttaaaataagaaatgtcttatctgtatatgtatgagtcttcctgtcattgtatttggcacatgaatattgtgtacaaggaattgttaagactggttttccctcaacaacatatattatacttgctactggaaaagtgtttaagacttagctaggtttccatttagatcttcatatctgttgcatggaagaaagttgggttcttggcatagagttgcatgatatgtaagattttgtgcattcataattgttaaaaatctgtgttccaaaagtggacatagcatgtacaggcagttttctgtcctgtgcacaaaaagtttaaaaaagttgtttaatatttgttgttgtatacccaaatacgcaccgaataaactctttatattcattcaaaga

SEQ ID NO: 105 - DNA, 1203 bp, Homo sapiens
catctggtgtattgactgtggccagtcttaaagctagtttttgctatgtggaacatgctgctctaattcagatttaaagagtttcttcctgttaattcgaagctcactgtgcctcttgtttccgagggaagaaggactgattaagtcatctaaatggatgcaatactgaattacaggtcagaagatactgaagattactacacattactgggatgtgatgaactatcttcggttgaacaaatcctggcagaatttaaagtcagagctctggaatgtcacccagacaagcatcctgaaaaccccaaagctgtggagacttttcagaaactgcagaaggcaaaggagattctgaccaatgaagagagtcgagcccgctatgaccactggcgaaggagccagatgtcgatgccattccagcagtgggaagctttgaatgactcagtgaagacgtcaatgcactgggttgtcagaggtaaaaaagacctgatgctggaagaatctgacaagactcataccaccaagatggaaaatgaggaatgtaatgagcaaagagaaagaaagaaagaggagctggcttcaaccgcagagaaaacggagcagaaagaacccaagcccctagagaagtcagtctccccgcaaaattcagattcttcaggttttgcagatgtgaatggttggcaccttcgtttccgctggtccaaggatgctccctcagaactcctgaggaagttcagaaactatgaaatatgaaatatctctgcttcaaaaaatgaggaagagcaagactgtcccctatgctgccaacatgcagtctttgtttatgtcttaaaaatgtcatgtttatgtcatgtctgtgaattgctgagtactaattgattcctccatccttgaatcagttctcataatgctttttaaataagaaaaattcagaagatgaatttcttccaatatttgaataaattaaagctcttagatacagagtagattgtattatatgctttttcctattaatactacttatagaaatccattaaaaagcaatctctgtacagtgtatttaaatatttcattgacatactgtgatctctattagtgatggatgtacaaaaaatgttttcttacccttgacttacaatgaaatgtgaaattacttgtctgaaccccgtggggagaaataaataattttcccaaagttcaaaaaaa

SEQ ID NO: 106 - DNA, 717 bp, Homo sapiens
  misc_feature (640)..(640): n is a, c, g, or t
  misc_feature (697)..(698): n is a, c, g, or t
aatatagaacaagtttgtacaaaaaagcaggctggtaccggtccggaattcccgggatggcctgcagttaattctcctgtgtcttgaatggttgggagatgagttggtcagacccttagtgaaatgatgtgggaaggaacaggaatgctgtggctctgaagaaggtagtagaacatcccacacctgctaataagcacattttgcaaactcagttgactcacctcaratttgcctagtgaaaactgaagggctggatgtagacccagagagcagggtggacagagcccatgctggaagtactgagcatcaggactgtatggggctggctttagcatcatcattctgtgcaaaracaaataattaatgtmacactgtctgaaattttcaccaaaaccaaaaaggcgcattaamatgattgttccaacctcatggtttttmaagtgtgagcgcccagagacctcttcagaggctaagaragcatgcgctgccacagctgttagcatttggagacgtaattacaatgcccccactccccgcaccaaacctgggtttttmtaccgtttttgtagatgtmatgatgtaacgacccctgcaccctgaaaaaaataaatgtttttaaggacaaaaaaaaaaaaaaaanaaaaaargggggggggggggggggggaaaaaaaaaaaattaaattaataaattttwnnaaaaaaaaaaaaaaaaaaa

SEQ ID NO: 107 - DNA, 723 bp, Homo sapiens
ggaagtttactgtcatgagtctcggctggttggcgcatgtgacctttgaaggatgaagatggagtttgcaacatgagtatctctaaccttttgcttttcagggatcattttcaaaaattgcattggggccttcgttatttaccatagtattttcactttcatagttttgtcacctttttgtactgtgaacagttcaaccagtgaccgacttctctctcatgctgtttaccccacacacaatttcccactcaattctgaaaataagaacctgttaataggttggaaagctgtgtactctattcatatattggtctttcatgctagtggagagtggtgtcattagcatcttaattttagagttgtgaaatgattttaccaattaggaattgaatgtgtattttttttctgtttaataagaagagcaaatttgaataaataagctggtgtagataaacttaataatcatgctttttcttgcttggagataggtgatgtgttgtcatatcctgtgatacaggtcactcatctggccttctggttctgaagtttaagtctggtttgaatatgtaataatactactcagcatttcttggtgcctaagtgagacgaaacttaaatgttatgatatttacttcatggtatctggtactggtcatttcaaataaatgggtatggatatctaatatgtgatatttgaactgaataaaacttaccagtgtgtaa

SEQ ID NO: 108 - DNA, 3244 bp, Homo sapiens
taatagaacacttcacctgaacctaaaatggtgagcgagagtcaccatgaggccctggcagccccgcctgtcaccactgtcgcgactgttctgccaagcaatgccacagagccagccagtcctggagaaggaaaggaagatgcattttctaagctgaaggagaagtttatgaatgagttgcataaaattccattgccaccgtgggccttaattgcaatagccatagtcgcagtccttttagtcctgacctgctgcttttgtatctgtaagaaatgtttgttcaaaaagaaaaacaagaagaagggaaaggaaaaaggagggaagaatgccattaacatgaaagatgtaaaagacttagggaagacgatgaaagatcaggccctcaaggatgatgatgctgaaactggattgacagatggagaagaaaaagaagaacccaaagaagaggagaaactgggaaaacttcagtattcactggattatgatttccaaaataaccagctgctggtagggatcattcaggctgctgaactgcccgccttggacatggggggcacatctgatccttacgtgaaagtgtttctgctacctgataagaagaagaaatttgagacaaaagtccaccgaaaaacccttaatcctgtcttcaatgagcaatttactttcaaggtaccatactcggaattgggtggcaaaaccctagtgatggctgtatatgattttgatcgtttctctaagcatgacatcattggagaatttaaagtccctatgaacacagtggattttggccatgtaactgaggaatggcgtgacctgcaaagtgctgagaaggaagagcaagagaaattgggtgatatctgcttctcccttcgctacgtacctactgctggtaagctgactgttgtcattctggaggcaaagaacctgaagaagatggatgtgggtggcttatccgatccttatgtgaagattcatctgatgcagaatggtaagaggctgaagaagaaaaagacaacaattaaaaagaacacacttaacccctactacaatgagtcattcagctttgaagtaccttttgaacaaatccagaaagtgcaggtggtggtaactgttttggactatgacaagattggcaagaacgatgccatcggcaaagtctttgtgggctacaacagcaccggcgcggagctgcgacactggtcagacatgctggccaaccccaggcgacctattgcccagtggcacaccctgcaggtagaggaggaagttgatgccatgctggccgtcaagaagtaaaggaaagaagaagcctttctgcatttgcccatatagtgctctttagccagtatctgtaaatacctcagtaatatgggtcctttcatttttccagccatgcattcctaacacaattcagtggtacttggaatcctgttttaatttgcacaaatttaaatgtagagagcccctaagtccttcatcataccactgccctccaaatctactcttcttttaagcaatatgatgtgtagatagagcatgaatgaaattatttattgtatcacactgttgtatataccagtatgctaaagatttatttctagtttgtgtatttgtatgttgtaagcgtttcctaatctgtgtatatctagatgtttttaataagatgttctattttaaactatgtaaattgactgagatataggagagctgataatatattatacggtaaatatagtatcgtctgcattccagcaaaaatatcaactcgtaaggcactagtacagttaaactgacatcttaaaggacaacttaaacctgagctttctattgaatcatttgagtaccaagataaacttacaccacatacttggtgggtgaatccaattttgtagaattcctacacaggcaaaatagcatgatctgagcagcagcatccaggctgacctcaaggaagcatagccacaaaacagaatagcacctgtctgtacatatttacaaagctaaaataatggcttcactcttatatttgaggaagcaactgaacaggagtcaatgatttcatattactgcatatagaataacaacaaggtgttccgtgtgtgtgtgtgtgtgtgtgtgtgtgtgtgtgtgtgtgtgtgtgcacatttgtttggggatgggggagaagaagctaaggggagaagtcaacatttatgaaatattgcctgactatttaaaaagaaaaaagtagctctccattatcacctttatacaaaatgtacatcctgtgaattctgttccagatttcacacctacaataattccaaaaggtttgcacattagagtttgtaacaaaatattttattatataaaaccaggttagaaggaatgcaggatatttttaacacaacaatctgtgcttattacacaaaattactttgtggtaaacagacagtattgtaatcccatcaaaagatgaaagaaaaacaaaaacaaaaaccaacaacaattagccatagttctgaatgcacttcaattaagccaaaacagacagctagtgatctttttatatgctctttttacttaagttttaatttgtcctttaaaaaaaggtgaaacaaaccaagaacaagttctagaaaactgaagcaacctcttatgtatactagatgcttgatttaggaggagtttttaaacgttttcaatgttattatgtagtaaatgacactattatgaagctactagtcattccataagagtcttaaaggactgctctgtgtacactgtgactgccgtgtgtgcttagacccgtagtttcctcagtggatagcactcaatttattccgtagtgatattgtaacaatactgccattcccttctactgcactgcccaaggtgtgtgtagcacaaacagttctcattacaaaggaccaattcagaactgaaaagctatgcataggacaaggaagatacatagaatggggtggaacacagcattttgtcaagcactgtgcaatattccatatttttccccactatggtagacaaccatttcgtggaagggcagcctattatcccacactgcatctagccttttgtcccattcacttctgtgatccattttaatttccaggccacaagacagtagtgatgctctgaaatgaaagtttgtcttcacaaatatcaaaacaaaatggaggaaaactaagcattggcctcatgttcagtcttcaggatatcacaccacgtcttttcaaaaactaaa

SEQ ID NO: 109 - DNA, 2053 bp, Homo sapiens
catctttgatgagggcagagctcacgttgcattgaagacgaaacctcggggaggtcaggcgctgtctttccttccctccctgctcggcggctccaccacagttgcaacctgcagaggcccggagaacacaaccctcccgagaagcccaggtccagagccaaacccgtcactgaccccccagcccaggcgcccagccactccccaccgctaccatggccgaagacgcagacatgcgcaatgagctggaggagatgcagcgaagggctgaccagttggctgatgagtcgctggaaagcacccgtcgtatgctgcaactggttgaagagagtaaagatgctggtatcaggactttggttatgttggatgaacaaggagaacaactcgatcgtgtcgaagaaggcatgaaccatatcaaccaagacatgaaggaggctgagaaaaatttaaaagatttagggaaatgctgtggccttttcatatgtccttgtaacaagcttaaatcaagtgatgcttacaaaaaagcctggggcaataatcaggacggagtggtggccagccagcctgctcgtgtagtggacgaacgggagcagatggccatcagtggcggcttcatccgcagggtaacaaatgatgcccgagaaaatgaaatggatgaaaacctagagcaggtgagcggcatcatcgggaacctccgtcacatggccctggatatgggcaatgagatcgatacacagaatcgccagatcgacaggatcatggagaaggctgattccaacaaaaccagaattgatgaggccaaccaacgtgcaacaaagatgctgggaagtggttaagtgtgcccacccgtgttctcctccaaatgctgtcgggcaagatagctccttcatgcttttctcatggtattatctagtaggtctgcacacataacacacatcagtccacccccattgtgaatgttgtcctgtgtcatctgtcagcttcccaacaatactttgtgtcttttgttctctcttggtctctttctttccaaaggttgtacatagtggtcatttggtggctctaactccttgatgtcttgagtttcatttttcattttctctcctcggtggcatttgctgaataacaacaatttaggaatgctcaatgtgctgttgattctttcaatccacagtattgttcttgtaaaactgtgacattccacagagttactgccacggtcctttgagtgtcaggctctgaatctctcaaaatgtgccgtctttggttcctcatggctgttatctgtctttatgatttcatgattagacaatgtggaattacataacaggcattgcactaaaagtgatgtgatttatgcatttatgcatgagaactaaatagatttttagattcctacttaaacaaaaactttccatgacagtagcatactgatgagacaacacacacacacacaaaacaacagcaacaacaacagaacaacaacaaagcatgctcagtattgagacactgtcaagattaagttataccagcaaaagtgcagtagtgtcacttttttcctgtcaatatatagagacttctaaatcataatcatccttttttaaaaaaaagaattttaaaaaagatggatttgacacactcaccatttaatcatttccagcaaaatatatgtttggctgaaattatgtcaaatggatgtaatatagggtttgtttgctgcttttgatggctacgttttggagagagcaatcttgctgtgaaacagtgtggatgtaaattttataaggctgactcttactaaccaccatttcccctgtggtttgttatcagtacaattctttgttgcttaatctagagctatgcacaccaaattgctgagatgtttagtagctgataaagaaaccttttaaaaaaataatataaatgaatgaaatataaactgtgagataaatatcattatagcatgtaatattaaattcctcctgtctcctctgtcagtttgtgaagtgattgacattttgtagctagtttaaaattattaaaaattatagactcc

SEQ ID NO: 110 - DNA, 1334 bp, Homo sapiens
agcggattctgagccgagcccggtgccaagcgcagctagctcagcaggcggcagcggcggcctgagcttcagggcagccagctccctcccggtctcgccttccctcgcggtcagcatgaaagccttcagtcccgtgaggtccgttaggaaaaacagcctgtcggaccacagcctgggcatctcccggagcaaaacccctgtggacgacccgatgagcctgctatacaacatgaacgactgctactccaagctcaaggagctggtgcccagcatcccccagaacaagaaggtgagcaagatggaaatcctgcagcacgtcatcgactacatcttggacctgcagatcgccctggactcgcatcccactattgtcagcctgcatcaccagagacccgggcagaaccaggcgtccaggacgccgctgaccaccctcaacacggatatcagcatcctgtccttgcaggcttctgaattcccttctgagttaatgtcaaatgacagcaaagcactgtgtggctgaataagcggtgttcatgatttcttttattctttgcacaacaacaacaacaacaaattcacggaatcttttaagtgctgaacttatttttcaaccatttcacaaggaggacaagttgaatggacctttttaaaaagaaaaaaaaaatgtaaggaaaactaagaatgatcatcttcccagggtgttctcttacttggactgtgatattcgttatttatgaaaaagacttttaaatgccctttctgcagttggaaggttttctttatatactattcccaccatggggagcgaaaacgttaaaatcacaaggaattgcccaatctaagcagactttgccttttttcaaaggtggagcgtgaataccagaaggatccagtattcagtcacttaaatgaagtcttttggtcagaaattacctttttgacacaagcctactgaatgctgtgtatatatttatatataaatatatctatttgagtgaaaccttgtgaactctttaattagagttttcttgtatagtggcagagatgtctatttctgcattcaaaagtgtaatggtgtacttattcatgctaaactttttataaaagtttagttgtaaacttaacccttttatacaaaataaatcaagtgtgtttattgaatggtgattgcctgctttatttcagaggaccagtgctttgatttttattatgctatgttataactgaacccaaataaatacaagttcaaatttatgtagactgtataagattataataaaacatgtctgaagtcaaaaaaaaaaaaaaaaaaaaaaaagaaaaaaaaaaaaaaa

SEQ ID NO: 111 - DNA, 1433 bp, Homo sapiens
attcggggcgagggaggaggaagaagcggaggaggcggctcccgctcgcagggccgtgcacctgcccgcccgcccgctcgctcgctcgcccgccgcgccgcgctgccgaccgccagcatgctgccgagagtgggctgccccgcgctgccgctgccgccgccgccgctgctgccgctgctgccgctgctgctgctgctactgggcgcgagtggcggcggcggcggggcgcgcgcggaggtgctgttccgctgcccgccctgcacacccgagcgcctggccgcctgcgggcccccgccggttgcgccgcccgccgcggtggccgcagtggccggaggcgcccgcatgccatgcgcggagctcgtccgggagccgggctgcggctgctgctcggtgtgcgcccggctggagggcgaggcgtgcggcgtctacaccccgcgctgcggccaggggctgcgctgctatccccacccgggctccgagctgcccctgcaggcgctggtcatgggcgagggcacttgtgagaagcgccgggacgccgagtatggcgccagcccggagcaggttgcagacaatggcgatgaccactcagaaggaggcctggtggagaaccacgtggacagcaccatgaacatgttgggcgggggaggcagtgctggccggaagcccctcaagtcgggtatgaaggagctggccgtgttccgggagaaggtcactgagcagcaccggcagatgggcaagggtggcaagcatcaccttggcctggaggagcccaagaagctgcgaccaccccctgccaggactccctgccaacaggaactggaccaggtcctggagcggatctccaccatgcgccttccggatgagcggggccctctggagcacctctactccctgcacatccccaactgtgacaagcatggcctgtacaacctcaaacagtgcaagatgtctctgaacgggcagcgtggggagtgctggtgtgtgaaccccaacaccgggaagctgatccagggagcccccaccatccggggggaccccgagtgtcatctcttctacaatgagcagcaggaggcttgcggggtgcacacccagcggatgcagtagaccgcagccagccggtgcctggcgcccctgccccccgcccctctccaaacaccggcagaaaacggagagtgcttgggtggtgggtgctggaggattttccagttctgacacacgtatttatatttggaaagagaccagcaccgagctcggcacctccccggcctctctcttcccagctgcagatgccacacctgctccttcttgctttccccgggggaggaagggggttgtggtcggggagctggggtacaggtttggggagggggaagagaaatttttatttttgaacccctgtgtcccttttgcataagattaaaggaaggaaaagt

SEQ ID NO: 112 - DNA, 2212 bp, Homo sapiens
gcccggctcctgggagcaggtctcggcccccgcttggggccccggccgtgcggccggagggagcggccggatggagcggaggatgaaagccggatacttggaccagcaagtgccctacaccttcagcagcaaatcgcccggaaatgggagcttgcgcgaagcgctgatcggcccgctggggaagctcatggacccgggctccctgccgcccctcgactctgaagatctcttccaggatctaagtcacttccaggagacgtggctcgctgaagctcaggtaccagacagtgatgagcagtttgttcctgatttccattcagaaaacctagctttccacagccccaccaccaggatcaagaaggagccccagagtccccgcacagacccggccctgtcctgcagcaggaagccgccactcccctaccaccatggcgagcagtgcctttactccagtgcctatgacccccccagacaaatcgccatcaagtcccctgcccctggtgcccttggacagtcgcccctacagccctttccccgggcagagcaacggaatttcctgagatcctctggcacctcccagccccaccctggccatgggtacctcggggaacatagctccgtcttccagcagcccctggacatttgccactccttcacatctcagggagggggccgggaacccctcccagccccctaccaacaccagctgtcggagccctgcccaccctatccccagcagagctttaagcaagaataccatgatcccctgtatgaacaggcgggccagccagccgtggaccagggtggggtcaatgggcacaggtacccaggggcgggggtggtgatcaaacaggaacagacggacttcgcctacgactcagatgtcaccgggtgcgcatcaatgtacctccacacagagggcttctctgggccctctccaggtgacggggccatgggctatggctatgagaaacctctgcgaccattcccagatgatgtctgcgttgtccctgagaaatttgaaggagacatcaagcaggaaggggtcggtgcatttcgagaggggccgccctaccagcgccggggtgccctgcagctgtggcaatttctggtggccttgctggatgacccaacaaatgcccatttcattgcctggacgggccggggaatggagttcaagctcattgagcctgaggaggtcgccaggctctggggcatccagaagaaccggccagccatgaattacgacaagctgagccgctcgctccgatactattatgagaaaggcatcatgcagaaggtggctggtgagcgttacgtgtacaagtttgtgtgtgagcccgaggccctcttctctttggccttcccggacaatcagcgtccagctctcaaggctgagtttgaccggcctgtcagtgaggaggacacagtccctttgtcccacttggatgagagccccgcctacctcccagagctggctggccccgcccagccatttggccccaagggtggctactcttactagcccccagcggctgttccccctgccgcaggtgggtgctgccctgtgtacatataaatgaatctggtgttggggaaaccttcatctgaaacccacagatgtctctggggcagatccccactgtcctaccagttgccctagcccagactctgagctgctcaccggagtcattgggaaggaaaagtggagaaatggcaagtctagagtctcagaaactcccctgggggtttcacctgggccctggaggaattcagctcagcttcttcctaggtccaagccccccacaccttttccccaaccacagagaacaagagtttgttctgttctgggggacagagaaggcgcttcccaacttcatactggcaggagggtgaggaggttcactgagctccccagatctcccactgcggggagacagaagcctggactctgccccacgctgtggccctggagggtaccggtttgtcagttcttggtgctctgtgttcccagaggcaggcggaggttgaagaaaggaacctgggatgaggggtgctgggtataagcagagagggatgggttcctgctccaagggaccctttgcctttcttctgccctttcctaggcccaggcctgggtttgtacttccacctccaccacatctgccagaccttaataaaggcccccacttctcccaaaaaaaaaaaaaaa

SEQ ID NO: 113 - DNA, 3053 bp, Homo sapiens
ctcctcccctccccctccgccctcctccgctccgggccagcgcggcggcggcggcggcggcagcagcaggagcagccccggctgcgggtcgcgacggcggcggggcgccccctcccccgtgccggggcgcggcggagggatgtggggccttgcgggaggaaggcttttcggcatcttctcggccccggtgctggtggctgtggtgtgctgcgcccagagtgtgaacgatcccgggaacatgtcctttgtgaaggagacggtggacaagctgttgaaaggctacgacattcgcctaagacccgacttcgggggtcccccggtctgcgtggggatgaacatcgacatcgccagcatcgacatggtttccgaagtcaacatggattataccttaaccatgtattttcaacaatattggagagataaaaggctcgcctattctgggatccctctcaacctcacgcttgacaatcgagtggctgaccagctatgggtgcccgacacatatttcttaaatgacaaaaagtcatttgtgcatggagtgacagtgaaaaaccgcatgatccgtcttcaccctgatgggacagtgctgtatgggctcagaatcaccacgacagcagcatgcatgatggacctcaggagataccccctggacgagcagaactgcactctggaaattgaaagctatggctacaccacggatgacattgagttttactggcgaggcggggacaaggctgttaccggagtggaaaggattgagctcccgcagttctccatcgtggagcaccgtctggtctcgaggaatgttgtcttcgccacaggtgcctatcctcgactgtcactgagctttcggttgaagaggaacattggatacttcattcttcagacttatatgccctctatactgataacgattctgtcgtgggtgtccttctggatcaattatgatgcatctgctgctagagttgccctcgggatcacaactgtgctgacaatgacaaccatcaacacccaccttcgggagaccttgcccaaaatcccctatgtcaaagccattgacatgtaccttatgggctgcttcgtctttgtgttcctggcccttctggagtatgcctttgtcaactacattttctttggaagaggccctcaaaggcagaagaagcttgcagaaaagacagccaaggcaaagaatgaccgttcaaagagcgaaagcaaccgggtggatgctcatggaaatattctgttgacatcgctggaagttcacaatgaaatgaatgaggtctcaggcggcattggcgataccaggaattcagcaatatcctttgacaactcaggaatccagtacaggaaacagagcatgcctcgagaagggcatgggcgattcctgggggacagaagcctcccgcacaagaagacccatctacggaggaggtcttcacagctcaaaattaaaatacctgatctaaccgatgtgaatgccatagacagatggtccaggatcgtgtttccattcactttttctcttttcaacttagtttactggctgtactatgttaactgagtgactgtacttgatttttcaaagacttcatttaacactgagtgaaatattactctgcctgtcaagtttttatacctgtacacacacagacacacaagcagacacacacatatatacatacgcaattgtatatatatgtgaactttctcagcatatatataaaatacacgtgtatatgaggatgtatgtgtatatgtttatacacacaggagtcagtgcccatgtgtatggaagacaaatacacatacatatatacattttgcagctatggacaatttaccacaggatgcatattaaagaaagtcatagtttttttcttttttaattgaaagggacaagtatcatctaaatattatgccttgagaatgagggcgtgaaacacaatatcatccccaaatgtgtcttgtattatcataagttagatgttttagtttaaaaatcagaaagacattcttagttaatctttgaaaactcatacagtggtattgctagtttaaaatgagtcacttacttcatatcctctcgttcagtttagtaagcaaaggcttcttggcttctctggtgatggggtttgttttcatcgggcatacgttttctgcaatggtttagtggctggggtgagccactggcagtgtgcttacctgttgtctgaaacatagatagatcccacgttgatgtctgaacgaccgtcttttgaaaactcatcgggagtgaatggcatctcgttgtaagtactctaatatacagtgtgtagtttgtttctgttgttcacttggagtggatccagcttcactgtcatgtgcgaacacagtgacacgtttggccagtgacatttcaatcactgaaaatgtgctctacatctcgtatggatttctaggcctgatatccaacagaaagcatagacgtctcaggttattcgttactctaaggtaaaaccatctaggatgattttcccccttgcagttatgttatcattcttataacattgtatgttaatagaaaatatatttgcataatatgcatatatatgtatatttaccaagattttgtttcttacgcttgctatcatggcagcatgcgatgtcatattttcctttatgtgatgtaactactttctgttatctagaaattaagattgaagctaaaacacttctactgttcaatttcagaaactaagaatcatcctcatgcctttatttctgtatctgacatatttcataagcacatccaactactcctagactgactaggattctgcaggaacatgacccgtacacaccacgcgtcacccaacgacccatgaccgttctctgaggcaaaggagggcaacctgacagcaaacacagtcactgttggttccttctgatccacagcctcatcagtatttggactttttaaagctcgtagaaacaagacaaggtgcaccggtttcatagacgcaaccttaacttactatttagatgagatctttctaaagaaaaaaaaaaaaaaa

SEQ ID NO: 114 - DNA, 5221 bp, Homo sapiens
cggccgcccgggcaggttttgtagactttcatagccaaagaaaccggcttcggcttctttaaaatccccgacgactcacctgattaacctgctgcagttctgaccctgccaagagctgacaatttactggttcatcaatgaaacaatattaaattatgaagatgtaaggaaaaaatcctacgctaacactgtcgcagtttgaaaggcttctctgcagaatgtcaaacaaagatcgacacattgattccagctgttcgtccttcatcaagacggaaccttccagcccagcctccctgacggacagcgtcaaccaccacagccctggtggctcttcagacgccagtgggagctacagttcaaccatgaatggccatcagaacggacttgactcgccacctctctacccttctgctcctatcctgggaggtagtgggcctgtcaggaaactgtatgatgactgctccagcaccattgttgaagatccccagaccaagtgtgaatacatgctcaactcgatgcccaagagactgtgtttagtgtgtggtgacatcgcttctgggtaccactatggggtagcatcatgtgaagcctgcaaggcatctttcaagaggaaaatacaagccaatatagaatacagctgccctgccacgaatgaatgtgaaatcacaaagcgcagacgtaaatcctgccaggcttgccgcttcatgaagtgtttaaaagtgggcatgctgaaagaaggggtgcgtcttgacagagtacgtggaggtcggcagaagtacaagcgcaggatagatgcggagaacagcccatacctgaaccctcagctggttcagccagccaaaaagccatataacaagattgtctcacatttgttggtggctgaaccggagaagatctatgccatgcctgaccctactgtccccgacagtgacatcaaagccctcactacactgtgtgactgtgccgaccgagagttggtggttatcattggatgggcgaagcatatcccaggcttctccacgctgtccctggcggaccagatgagccttctgcagagtgcttggatggaaattttgatccttggtttcgtataccggtctctttcgtttgaggatgaacttgtctatgcagacgattatataatggacgaagaccagtccaaattagcaggccttcttgatctaaataatgctatcctgcagctggtaaagaaatacaagagcatgaagctggaaaaagaagaatttgtcaccctcaaagctatagctcttgctaattcagactccatgcacatagaagatgttgaagccgttcagaagcttcaggatgtcttacatgaagcgctgcaggattatgaagctggccagcacatggaagaccctcgtcgagctggcaagatgctgatgacactgccactcctgaggcagacctctaccaaggccgtgcagcatttctacaacatcaaactagaaggcaaagtcccaatgcacaaactttttttggaaatgttggaggccaaggtctgctaaaagctccctgggccttccatccttcattgttgaaaaggggaaataaacccaagagtgatgtcgaagaaacttagagtttagttaacaacatcaaaaatcaacagactgcactgataatttagcagcaagactatgaagcagctttcagattcctccataggttcctgatgagtttctttctactttctccatcatcttctttcctctttcttcccacatttctctttctctttattttttatccttttcttctttcacctcccttatttctttgcttctttcattcctagttcccattctcctttattttcttcccgtctgcctgccttctttcttttctttacctactctcattcctctcttttctcatccttccccttttttctaaatttgaaatagctttagtttaaaaaaaaatcctcccttccccctttcctttccctttctttcctttttccctgtccttttccctttcctttcctttcctcttgaccttctttccatctttctttttcttccttctgctgctgaacttttaaaagaggtctctaactgaagagagatggaagccagccctgccaaaggatggagatccataatatggatgccagtgaacttattgtgaaccataccgtccccaatgactaaggaatcaaagagagagaaccaacgttcctaaaagtacagtgcacatatacaaattgactgagtgcagtattagatttcatgggagcagcctctaattagacaacttaagcaacgttgcatcggctgcttcttatcattgcttttccatctagagcagttacagccatttgatcccttaattgttttttcaagtctcccaggtatttgttagtttagctactatgtaactttttcagggaatagtttaagctttattcagtcatgcaatactaaagagaaataagaatactgcaattttgtgctggctttgaacaattacgaacaataatgaaggacaaatgaatcctgaaggaagatttttaaaaatgttttgtttcttcttacaaatggagatttttttgtaccagctttaccacttttcagccatttattaatatgggaatttaacttactcaagcaatagttgaagggaaggtgcatattatcacggttgcaatttatggttgtgtgcccagtctggtccccaaacatcaatttcttaacatgagctccagtttacctaaatgttcactgacacaaaggatgagattacacctacagtgactctgagtagtcacatatataagcactgcacatgagatatagatccgtagaattgtcaggagtgcacctctctacttgggaggtacaattgccatatgatttctagctgccatggtggttaggaatgtgatacatgcctgtttgcaaagtcacagaccattgcctcagaaggagctgtgagccagtattcatttaagaggcaataaggcaaatgccagaattaaaaaaaaaaaatcatcaaagacagaaaatgcctgaccaaattctaaaacctaatccatataagtttattcatttaggaatgttcgtttaaattaatctgcagtttttaccaagagctaagccaatatatgtgcttttcaaccagtattgtcacagcatgaaagtcacagtcaggttccagactgttaagaggtgtaatctaatgaagaaatcaattagatgccccgaaatctacagtcgctgaataaccaataaacagtaacctccatcaaatgctataccaatggaccagtgttagtagctgctccctgtattatgtgaacagtcttattctatgtacacagatgtaattaaaattgtaatcctaacaaacaaaagaaatgtagttcagcttttcaatgtttcatgtttgctgtgcttttctgaattttatgttgcattcaaagactgttgtcttgttcttgtggtgtttggattcttgtggtgtgtgcttttagacacagggtagaattagagacaatattggatgtacaattcctcaggagactacagtagtatattctattccttaccagtaataaggttcttcctaataataattaagagattgagactccaaacaagtattcattatgaacagatacacatcaaaatcataataatattttcagaacaaggaataatttctctaatggtttattatagaataccaatgtatagcttagaaataaaactttgaatatttcaagaatatagataagtctaatttttaaatgctgtatatatggctttcactcaatcatctctcagatgttgttattaactcgctctgtgttgttgcaaaactttttggtgcagattcgtttccaaaactattgctactttgtgtgctttaaacaaaataccttgggttgatgaaacatcaacccagtgctaggaatactgtgtatctatcattagctatatgggactatattgtagattgtggtttctcagtagagaagtgactgtagtgtgattcttgataaatcatcattagcaattcattcagatggtcaataacttgaaatttatagctgtgataggagttcagaaattggcacatccctttaaaaataacaacagaaaatacaactcctgggaaaaaaaggtgctgattctataagattatttatatatgtgagtgtttaaaaagattattttccagaaagtttgtgcagggtttaagttgctactattcaactacactatatataaataagatatatacaatatatacattgttttcactgtatcacattaaagtacttgggcttcagaagtaagaagccaaccaactgaaaacctgagatggagatatgttcaaagaatgagatacaattttttagttttcagtttaagtaactctcagcattacaaaagagtaagtatctcacaaataggaaataaaactaaaacgtagatttaaaaaagaactgcacgggctttagggtaaatgctcatcttaaacctcactagagggaagtcttctcaagtttcaagcaagaccatttacttaatgtgaagttttggaaagttataaaggtgtatgttttagccatatgatcctaaatttaattttgctcttttaggttcgttcttatttaaagcaatatgattgtgtgactccttgtagttacacttgtgtttcaatcagatcagattgttgtatttattccactattttgcatttaaatgataacataacagatataaaaaatttaaaactgctatttttcttatagaagagaaaatgggtgttggtgattgtattttaattatttaagcgtctctgtttacctgcctaggaaaacattttatggcagtcttatgtgcaaagatcgtaaaaggacaaaaaatttaaactgcttataataatccaggagttgcattatagccagtagtaaaaaaaataataataataataataaaaccatgtctatagctgtagatgggcttcacatctgtaaagcaatcaattgtatatttttgtgatgtgtaccatactgtgtgctccagcaaatgtccatttgtgtaaatgtatttattttatattgtatatattgttaaatgcaaaaaggagatatgattctgtaactccaatcagttcagatgtgtaacccaaatattatgcctttcaggatgatggtagagcaatattaaacaagcttccacttttg

SEQ ID NO: 115 - DNA, 6218 bp, Homo sapiens
agcttcgtcgagaacggaggacaccggcggtccagggtcctgggcagtcgcgccagagctgagcggagggcgcggcgcgagaacgaatctttgtgacattctctctcagcattctttatcccctgtttgctgaagacttcgaccaaagctggtcttagctgttggcattctcctgagaaaaggatagcttcagaaatcagaaaaacatttgggaggtgtctagcccagtggaccttctgaagagcaatgctaagaagacgtttggtttaaagaattaaaaggaagaacaacttaagagcttcttcaaagtttcccgcatgaaaattacttaaacttgcacacaacgtttcacaaaatcttttgtgaaagaagaaaaggaaattcagtgtgtgagtctcagcaggagttaagctaatgcagcttaaaataatgccgaaaaagaagcgcttatctgcgggcagagtgcccctgattctcttcctgtgccagatgattagtgcactggaagtacctcttgatccaaaacttcttgaagacttggtacagcctccaaccatcacccaacagtctccaaaagattacattattgaccctcgggagaatattgtaatccagtgtgaagccaaagggaaaccgcccccaagcttttcctggacccgtaatgggactcattttgacatcgataaagaccctctggtcaccatgaagcctggcacaggaacgctcataattaacatcatgagcgaagggaaagctgagacctatgaaggagtctatcagtgtacagcaaggaacgaacgcggagctgcagtttctaataacattgttgtccgcccatccagatcaccattgtggaccaaagaaaaacttgaaccaatcacacttcaaagtggtcagtctttagtacttccctgcagacccccaattggattaccaccacctataatattttggatggataattcctttcaaagacttccacaaagtgagagagtttctcaaggtttgaatggggacctttatttttccaatgtcctcccagaggacacccgcgaagactatatctgttatgctagatttaatcatactcaaaccatacagcagaagcaacctatttctgtgaaggtgatttcagctaaatcaagtagagagaggccaccaacatttttaactccagaaggcaatgcaagtaacaaagaggaattaagaggaaatgtgctttcactggagtgcattgcagaaggactgcctaccccaattatttactgggcaaaggaagatggaatgctacccaaaaacaggacagtttataagaactttgagaaaaccttgcagatcattcatgtttcagaagcagactctggaaattaccaatgtatagcaaaaaatgcattaggagccatccaccataccatttctgttagagttaaagcggctccatactggatcacagcccctcaaaatcttgtgctgtccccaggagaggatgggaccttgatctgcagagctaatggcaaccccaaacccagaattagctggttaacaaatggagtcccaatagaaattgcccctgatgaccccagcagaaaaatagatggcgataccattattttttcaaatgttcaagaaagatcaagtgcagtctatcagtgcaatgcctctaatgaatatggatatttactggcaaacgcatttgtaaatgtgctggctgagccaccacgaatcctcacacctgcaaacacactctaccaggtcattgcaaacaggcctgctttactagactgtgccttctttgggtctcctctcccaaccatcgagtggtttaaaggagctaaaggaagtgctcttcatgaagatatttatgttttacatgaaaatggaactttggaaattcctgtggcccaaaaggacagtacaggaacttatacgtgtgttgcaaggaataaattagggatggcaaagaatgaagttcacttagaaatcaaagatgctacatggatcgttaaacagcccgaatatgcagttgtgcaaagagggagcatggtgtcctttgaatgcaaagtgaaacatgatcacaccttatccctcactgtcctgtggctgaaggacaacagggaactgcccagtgatgaaaggttcactgttgacaaggatcatctagtggtagctgatgtcagtgacgatgacagcgggacctacacgtgtgtggccaacaccactctggacagcgtctccgccagcgctgtgcttagcgttgttgctcctactccaactccagctcccgtttacgatgtcccaaatcctccctttgacttagaactgacagatcaacttgacaaaagtgttcagctgtcatggaccccaggcgatgacaacaatagccccattacaaaattcatcatcgaatatgaagatgcaatgcacaagccagggctgtggcaccaccaaactgaagtttctggaacacagaccacagcccagctgaacctgtctccttacgtgaactactccttccgcgtgatggcagtgaacagcattgggaagagcttgcccagcgaggcgtctgagcagtatttgacgaaagcctcagaaccagataaaaaccccacagctgtggaaggactgggatcagagcctgataatttggtgattacgtggaagcccttgaatggtttcgaatctaatgggccaggccttcagtacaaagttagctggcgccagaaagatggtgatgatgaatggacatctgtggttgtggcaaatgtatccaaatatattgtctcaggcacgccaacctttgttccatacctgatcaaagttcaggccctgaatgacatggggtttgcccccgagccagctgtagtcatgggacattctggagaagacctcccaatggtggctcctgggaacgtgcgtgtgaatgtggtgaacagtaccttagccgaggtgcactgggacccagtacctctgaaaagcatccgaggacacctacaaggctatcggatttactattggaagacccagagttcatctaaaagaaacagacgtcacattgagaaaaagatcctcaccttccaaggcagcaagactcatggcatgttgccggggctagagccctttagccactacacactgaatgtccgagtggtcaatgggaaaggggagggcccagccagccctgacagagtctttaatactccagaaggagtccccagtgctccctcgtctttgaagattgtgaatccaacactggactctctcactttggaatgggatccaccgagccacccgaatggcattttgacagagtacaccttaaagtatcagccaattaacagcacacatgaattaggccctctggtagatttgaaaattcctgccaacaagacacggtggactttaaaaaatttaaatttcagcactcgatataagttttatttctatgcacaaacatcagcaggatcaggaagtcaaattacagaggaagcagtaacaactgtggatgaagcgatggcaagccggcaggtggatattgcaactcagggctggttcattggtctgatgtgtgctgttgctctccttatcttaattttgctgattgtttgcttcatcagaagaaacaagggtggtaaatatccagttaaagaaaaggaagatgcccatgctgaccctgaaatccagcctatgaaggaagatgatgggacatttggagaatacagtgatgcagaagaccacaagcctttgaaaaaaggaagtcgaactccttcagacaggactgtgaaaaaagaagatagtgacgacagcctagttgactatggagaaggggttaatggccagttcaatgaggatggctcctttattggacaatacagtggtaagaaagagaaagagccggctgaaggaaacgaaagctcagaggcaccttctcctgtcaacgccatgaattcctttgtttaatttttaagctctttgccaatattccatttctctagaatgtttatcctaagcacttgtttgtcagccctctcatactatgaacatatgggtagagagtatattttctgctgtatgttagtattatgagaatagttacagcaaaaacataactcagtcaaatgatatgttaatatgaactggaatgcaaagtgcatactttttcattcaaaatgggtattcttgatttcctcagaactgataaaaaataatgcaacatcaccaacagatcctgttatttcctctgcaggatacagttcaatatgatgcatgaaaaatgctccacatttaaaggacatacccgtgtatgttatgaaaacatggtttgatactttgtttatactaccctcagctgaacccctatatatgaattccgttttcattgtcaagagtgttactgtagtattctctagaacttcaatgtctttgtggacattgttgtgaaattggtgactatgtatagctgtcgttagtctttttgggagactgttaggaacagtttgtacagtatatacttgctaaatgagttcattatgacagtcacattgctgatgcttactgagaactattacctactcttggctcctgttactccgtaggcttcttaatcttccaggcattacagcagcacagtgttctactttttacatcatttctatgttcggttgtttttaggcataaacaatgtgtattgcagtgcatttcggcatttgtgccatactgaaagaatcaaaaacaaatcatccaaattaaatttcaaacattatttcagagaacacagggcaagacacatacagtgccttcagatattaagcattccacaacatcgtgcattctgtatcagctggtccagtccattctgggtcctagattactgtcattgtctaaaagtaacttttaaaaagcagagttcatgaaaactgcaatgctgggaaaagaaggaaacatgaaaataaaaataagacagtttattagaaatagcatttcctcataagcataaaaagaaaatctttgttgccaactgaagcacatgatgattttgtggtcctttatggtttctattacatgcagtaagaaagatgtcaacatgctagaaaattaattttaaaactaagttattccaacactaaaagcatacaacagcatgccaacagtaatatattattctccaagactttacctatgtaagtgttcaaaactctgcagcattaaacaacgtgtatgcaaattgttatggatacatttcagaatctaagaaatcaggcaagtgcttaaaaggccaacggtccaagggattacatctgcagtttaaaaagtaaatatatattctatcgtattcataaacaatatctatcaaatgggttacctccaaatatgaaaatctataacaacctatggttgaaggaatgctcagtttcatttgccaataaattggtttctcataacttgcatcaagtttaattttaagtaaagctttttatatgtagatattttgttgaatttgtaaatacacttaaaatgtagatgctatatgcttataggtgttacatacaaataaacatgcaatgtttatgttgtactgtataagaggtaagctaattaatgcagtgaatgggattggaaagcatctacttaaatatctattgggttcccccctccccccaccttttttgctgtgaaactgaaatagtgaacttttctacgtattgacagcagatttttcgatgaaatcttcagagctttgcctatggggcacagtaggcctagtaacctggcatgtttgatatatgtaggtaaagcataatttaaagtaatcccaggtaaagatggccctaaatactttcatgtctctatattcatttttcacagatccacctgtctcttgaaaatataaaaagacaaaacaggtttgccttggcatcagagagcacaaagattaaaagttactttaaatttgccaatattttgggagaacaataaaactacattttttcctcttccatactggtagatgcgaaatttatctgtgcatgaaagggtcacttctgtaatagtgcaacagatttggtattaaaaattaaatgtggttttaaaagttcctctctcttttgtaatttatgttcccaattgagtgtgaatgtccaagtaatggtgtatgtaatggtacaggcaaatgtgactggatttccctcaaaaaagtaactattaaacagtcttgatctctt

SEQ ID NO: 116 - DNA, 595 bp, Homo sapiens
accaggtgataattttattcacaaataaaaaaggtattacaaaactaagaaaatgataatttacacatttataaattccagtatgcaaaatagtaatgaagaaatctaaattgatataagctactataaagcaatgatggttttcctttctttttcttactagcacagacaatagtgcttaacctaggtaatagcaatattaacacattatctaaagtagaaaaatctctatttaaaaatatattccatatacacaaaattagaaaatgcatgactttacttggttgctcttgaaatcctcctcagtcttgtcaacgagcttctgcagcacaagaagccacagtggttatgcccattcagccacacgcattacccgacacagccctcctgacatcggcactctagcagctgagtttattgagtgctatgggatattccaacaaagtgaagtgcaaattgcatttttttcctcaaatgtttccaaggagtgtaaaatataacattgttgtatatttctagagtaggtagggtaaaatgtcttcatcttgataaaagttacccaggatttaccaaattcagtagcaaatgaaatcaa

SEQ ID NO: 117 - DNA, 1326 bp, Homo sapiens
cagagtggagcggccgccggagatgcctgacgcatctgtctgaggagcggtcagtgacgcgatggagcgggcaagggatcgcttacacctgagacgaactacagaacagcacgtaccagaggtggaagtccaagtcaaacgcagaaggactgcctcactgagcaaccaagagtgtcagttgtacccgaggcgttctcagcagcagcaagtacctgtggtggatttccaggctgaactgaggcaggcattcttagctgagacaccaagaggtggttaaagccatattggagtagcgaggaatctgattccaagcaaaaaccaggctccatctactctttgaagcttctgcccagcttgcattgtttctaggagaacctgcgtcatacctttatctatagccttcccctaggtcttcagaagcatcaagttttaactgtggacattggatttggtggaacagcaatcatgactgttggcaagagtagcaagatgctgcagcacattgactatagaatgagatgtatcctgcaagatggccgaatcttcattggcacctttaaggcttttgacaagcatatgaatttgatcctctgtgattgtgatgagttcagaaagatcaagccaaagaatgcgaagcaaccagagcgtgaagaaaagcgggttttgggtctggtgttgctgcgtggggagaacttggtatccatgactgtggaggggccaccccccaaagatactggcattgctcgggtaccacttgctggagctgctggaggccctggggttggtagggcagctggtagaggagtaccagctggtgtgccaattccccaggcccctgctggattggcaggccctgtccgaggagttgggggaccatcccagcaggtaatgactccacagggaagaggcactgtagcagctgctgctgttgctgcgactgccagtattgctggagccccaacacagtacccaccaggacggggcactccgcccccacccgtcggcagagcaaccccacctccaggcattatggctcctccacctggtatgagaccacccatgggcccaccaattgggcttccccctgctcgagggacgccaataggcatgccgcctccgggaatgagaccccctccaccaggcattagaggtccacctcccccaggaatgcgtccaccaagaccttagcatactgttgatccatctcagtcactttttcccctgcaatgcgtcttgtgaaattgtgtagagtgtttgtgagctttttgttccctcattctgcattaataatagctaataataaatgcatagagcaattaaactgtg

SEQ ID NO: 118 - DNA, 1219 bp, Homo sapiens
ggcacgagggggtttggtgcggccactccaaggccaaagccgcctccttggcctgtagagacagacctaggaggcgggtttggtgcggccactccaaggccaaagcgagaaaatcttactgcgcacgcgcaatagacagccgatggagccaccgatggagccgtccggaggggagcaagagcccggagccgtcaggttcctggacctgccctgggaagacgtgctgctcccacacgtcctgaaccgggtcccgctgcgccagctgctccggctgcagcgcgttagccgggccttccggtcgctggtgcagcttcacctggccgggctgcgtcgcttcgatgccgcgcaggtgggtccgcagatcccgcgggccgcattggcccggctgctgcgggatgccgaggggctgcaggagctggcactggcgccgtgtcacgaatggctgtcagacgaggacctggtgccggtgctggcgcggaatccgcagctgcggagtgtggcgttgggcggctgcgggcaactgagtcgccgggcgcttggggctttggccgagggctgcccacgcctgcagcgcctgtcgctcgcgcactgtgactgggtggacgggctggcgctgcgcggcctcgctgatcgctgcccggccctggaggagctggatctcaccgcctgccgccagctcaaggacgaggccatcgtgtacctggcgcagaggcgcggcgctggtctccgcagcctctctctggccgtcaacgccaacgtgggggacgccgcggttcaagagttggctcggaactgcccagaactccaccaccttgacctcaccggctgcctccgcgtcggaagcgacggtgtcaggacattggccgagtactgccccgtgctgcgttcgctgcgggtgcggcactgccaccatgtggcggagtccagcctgagccgcttgcggaagcgcggcgtggacatcgacgtggagccgccgctgcaccaggccctggtgctgctgcaggatatggcgggcttcgcaccttttgtcaacctgcaggtctgacccgcctgccaatcggagcacagctggactgtgtggctggggcctgacactgagctgtagggaaactgaactgtgaggacctctggtgagaggccagtgccctgccccaccctggagcttcaaataaagagctttttacccccaaaaaaaaaaaaaaaaaaaaaaaaaaaaaaa

SEQ ID NO: 119 - DNA, 1345 bp, Homo sapiens
aaaacagccggggctccagcgggagaacgataatgcaaagtgctatgttcttggctgttcaacacgactgcagacccatggacaagagcgcaggcagtggccacaagagcgaggagaagcgagaaaagatgaaacggacccttttaaaagattggaagacccgtttgagctacttcttacaaaattcctctactcctgggaagcccaaaaccggcaaaaaaagcaaacagcaagctttcatcaagccttctcctgaggaagcacagctgtggtcagaagcatttgacgagctgctagccagcaaatatggtcttgctgcattcagggcttttttaaagtcggaattctgtgaagaaaatattgaattctggctggcctgtgaagacttcaaaaaaaccaaatcaccccaaaagctgtcctcaaaagcaaggaaaatatatactgacttcatagaaaaggaagctccaaaagagataaacatagattttcaaaccaaaactctgattgcccagaatatacaagaagctacaagtggctgctttacaactgcccagaaaagggtatacagcttgatggagaacaactcttatcctcgtttcttggagtcagaattctaccaggacttgtgtaaaaagccacaaatcaccacagagcctcatgctacatgaaatgtaaaagggagcccagaaatggaggacatttcattctttttcctgaggggaaggactgtgacctgccataaagactgaccttgaattcagcctgggtgttcaggaaacatcactcagaactattgattcaaagttgggtagtgaatcaggaagccagtaactgactaggagaagctggtatcagaacagcttccctcactgtgtacagaacgcaagaagggaataggtggtctgaacgtggtgtctcactctgaaaagcaggaatgtaagatgatgaaagagacaatgtaatactgttggtccaaaagcatttaaaatcaatagatctgggattatgtggccttaggtagctggttgtacatctttccctaaatcgatccatgttaccacatagtagttttagtttaggattcagtaacagtgaagtgtttactatgtgcaagggtattgaagttcttatgaccacagatcatcagtactgttgtctcatgtaatgctaaaactgaaatggtccgtgtttgcattgttaaaaatgatgtgtgaaatagaatgagtgctatggtgttgaaaactgcagtgtccgttatgagtgccaaaaatctgtcttgaaggcagctacactttgaagtggtctttgaatacttttaataaatttattttgataaataatattg

SEQ ID NO: 120 - DNA, 1528 bp, Homo sapiens
ccggctcccattccggctccagcctccaatccgacccccatttcggctgcagcctcggacctagctccggccctcggtctatccggttgcatcctccctccctgttccggatcttatcttgcgccagcgcctactccaggatcccgtagccagacctcaagccatggctggtcccttctcccgtctgctgtccgcccgcccgggactcaggctcctggctttggccggagcggggtctctagccgctgggtttctgctccgaccggaacctgtacgagctgccagtgaacgacggaggctgtatcccccgagcgctgagtacccagacctccgaaagcacaacaactgcatggccagtcacctgaccccagcagtctatgcacggctctgcgacaagaccacacccactggttggacgctagatcagtgtatccagactggcgtggacaaccctggccaccccttcatcaagactgtgggcatggtggctggagatgaggagacctatgaggtatttgctgacctgtttgaccctgtgatccaagagcgacacaatggatatgacccccggacaatgaagcacaccacggatctagatgccagtaaaatccgttctggctactttgatgagaggtatgtattgtcctctagagtcagaactggccgaagcatccgaggactcagtctgcctccagcttgcactcgagcagagcgacgagaggtggaacgtgttgtggtggatgcactgagtggcctgaagggtgacctggctggacgttactataggctcagtgagatgacagaggctgaacagcagcagcttattgatgaccactttctgtttgataagcctgtgtccccgttgctgactgcagcaggaatggctcgagactggccagatgctcgtggaatttggcacaacaatgagaagagcttcctgatctgggtgaatgaggaggatcatacacgggtgatctccatggagaagggtggtaacatgaagagagtgtttgaaagattctgccgaggcctcaaagaggtggagagacttatccaagaacgtggctgggagttcatgtggaatgagcgtttgggatacatcttgacctgtccatctaacctgggcactggacttcgggcaggagtgcacatcaaactgcccctgctaagcaaagatagccgcttcccaaagatcctggagaacctaagactccaaaaacgtggtactggaggagtggacactgctgctacaggcggtgtctttgatatttctaatttggaccgactaggcaaatcagaggtggagctggtgcaactggtcatcgatggagtaaactatttgattgattgtgaacggcgtctggagagaggccaggatatccgcatccccacacctgtcatccacaccaagcattaactccccatcgccagctgatgactcaagattcccaggagttttgctcattctaatgatggcccattctacttgctctggacctgcccccgcatcccctgcctccatcctagt

SEQ ID NO: 121 - DNA, 1842 bp, Homo sapiens
ggaaaaaagctaccgtggcacgtgccccggggagtgatgcggtggcccggtttgcacggagagcgggacaccgcctggggagccgcgctcgtagcctgggggcgggacgcggcggccgctccctccgcccccgagtagctgccaccgcctggctgcgccccagcccagtagctcagacgcggccgcatcccggtggactgtagaggcggcagcgagctagagcccgagtcgcagctccgggccgcagagcgctgggcgagcgcgagcgccagggcaccggcagggcaggcagctgcgcgcggctggagtcatgctatactgaaaagacacttcatcaagataactctgggagaagcagaaaaccctgtgccagggacaggaaagataggaatgttgctatgaggacagattcatcaaaaatgactgacgtggagtctggggtcgccaattttgcatcttcagcaagggcaggccgccggaatgccttaccagacatccagagttcagctgccacagacggaacctcagatttgcccctcaaactggaggctctctccgtgaaggaagatgcaaaagagaaagatgaaaaaacaacacaagaccaattggaaaagcctcaaaatgaagaaaaatgaaggctcataatctatcaagagtgctgaatttctgcatgttgaaagacttagtggttctgttttcttgagacatttaatctggtggtaactgtggtaacattgcagccctaagcagcatgtgtatattagataattgtgttgtgatgctactcactttgattgcaatgatgatgtccaaggtaagctattaaaaggcaggttacttccaaatcgcactgaaggaaaaggttaagaataatacatgatcacagaaatgcataccactgtctgtaaacccaacaaaattcactgttctcttttggatttatttagcctgatgtatttttaattcaatttttatggtgatgggcaaatcattcttggtaaatgtaaatcaaacatgattgatttaaaacttcatggaatttgtagaaaattatggacatttttggtgagaaagaacaatagtcaaaactcacatggatagagtgtgtttgttttttgccaaaaatgccccagactttttcccaaacctcaaaaacgtcttggaaaaattgtaaaagtttgataacagaaacatctttaggatatttttgtctgacatattttgcttctagtatgtgcctactgtgatttttttcatgtggaaaatgcaaaatttgtaacaaaatggttatatggaacatgcctattaaatgaattttactatcttccctaactttggtctgtgtatgtgtgtgtgttttactttaatatgaattatacaaaatactagttgttttacactctcttttcttattcttagggcttttgtgtatgtctgacttgtttttaaataacttcctcagcaatgcagaccttaatttttatatttttttaaagtagctaacatagcagtaggcacttaagcatttagtcaatgatattggtagaaatagtaaaatacatcctttaaatatatatctaagcatatattttaaaaggagcaaaaataaaaccaaagtgttagtaaattttgatttattagatattttagaaaaataatagaattctgaagttttaaaaatgtcagtaattaatttattttcattttcagaaatatatgcatgcagttatgttttatttgattgttgacttaggctatgtctgtatacagtaaccaaataaactctttcactattaaagagatttcttactgaaaaaaaaaaaaaaaaaaaaaaaaaaaaaa

SEQ ID NO: 122 - DNA, 1088 bp, Homo sapiens
actgcagcaatggatacaaaagttaagcaagaacacagtgacagatgacatcctctgcacttcccccgggcatctcgacaaaaaggaattgaaagccctaaatagtgaaattctctgtccaggtttagtaaataacccatccatgccaacacagactagttaccttatggtcaccactcctgcaacaacaacaaatacggctgatactattttacgatctcttacggacgctgtgccactgtctgttctaatattgggacttctgattatgttcatcactattgttttctgtgctgcagggatagtggttcttgttcttcaccgcaggagaagatacaagaagaaacaagtagatgagcaaatgagagacaacagtcctgtgcatcttcagtacagcatgtatggccataaaaccactcatcacactactgaaagaccctctgcctcactctatgaacagcacatggtgagccccatggttcatgtctatagaagtccatcctttggtccaaagcatctggaagaggaagaagagaggaatgagaaagaaggaagtgatgcaaaacatctccaaagaagtcttttggaacaggaaaatcattcaccactcacagggtcaaatatgaaatacaaaaccacgaaccaatcaacagaatttttatccttccaagatgccagctcattgtacagaaacattttagaaaaagaaagggaacttcagcaactgggaatcacagaatacctaaggaaaaacattgctcagctccagcctgatatggaggcacattatcctggagcccacgaagagctgaagttaatggaaacattaatgtactcacgtccaaggaaggtattagtggaacagacaaaaaatgagtattttgaacttaaagctaatttacatgctgaacctgactatttagaagtcctggagcagcaaacatagatggagagtttgagggctttcgcagaaatgctgtgattctgttttaagtccataccttgtaaataagtgccttacgtgagtgtgtcatcaatcagaacctaagcacagcagtaaactatggggaaaaaaaaaaaaaaaaaaa

SEQ ID NO: 123 - DNA, 510 bp, Homo sapiens
ccattagaagctgaagttttattataggataacagtacataaagcacatctaaaattgatgtgttcaatgcacttttaataaaggtaatgtaatattaaaggtacagtttctaagtacaatataacaacattcatattagaatgaaaattggagtatttaaaagacaacattaaatctctcttttttgtacagcttgtatttacaaaatgaatcaaaatattttttttttaaattcaggactcaataaaataaacagctggaaataagcagactagtgtaagagtgaattgaaaagaaaacccaaggtaagtgaaaagttggacgatcctctaataaagatcattagcaaagttttagttcaatactagttttaggattcccataaatggcttgcatttttagtgtggcagaaaaggagtttttacatactgtacacaaaacagacagcatatatttataggtacagtattactgtttccaaacttgcatgtatatttacagaaggctga

SEQ ID NO: 124 - DNA, 639 bp, Homo sapiens
cgcgggaacgctaacctggtccggagcgagtctgggtctcagccccgcgaacagcctttcacgagtcttcaagctttcaggctatcttctagtcaagatgagtgataagccagacttgtcggaagtggagaagtttgacaggtcaaaactgaagaaaactaatactgaagaaaaaaatactcttccctcaaaggaaactatccagcaagagaaagagtgtgttcaaacatcataaaatggggatcgcctcccaacagcagatttcgacattacctgagagtcttgattttaggcttgttttttgtaaacccatgtgtttgtagagattttaggcgtcttcggatatcttctcacctatgttccctggctaagaagtcagaggtagccaatgtttccttaaattcatttttaaacttaccattggtgcatatgttccagatggcagatgctgtcaataatctcaccattgatgacctttgtgtatgtagttcttgcatcctatactggataagcctgttttaacctgctatgatgggtgcttccattgcttcataatcttcatgaagttgcatgcttttgcagcttttcacagtttatttgcatttctaatgtagtaataaagtaaccaatataatcatt

SEQ ID NO: 125 - DNA, 537 bp, Homo sapiens
  misc_feature (441)..(441): n is a, c, g, or t
tttgcagttagctctccttcccttgtaaacagttttattcatttttaagaatcatgcagcaatccataaatattgcattcttgatgtccccactgtagtgtgaccacaagtgtactccagggagaggggtacacagatggcacaagcagtatacacatgcacacaccaggtgtgcagaccaaagcaaagtgagcgaccagcgtgctaaactccaggtgggcaggaccccaactcccaggtgaggtgggcaggaccctaactcccaggccagccggcttagagtgtggtggtctgtgcccaggagatgcctcagcgggggtagaaactctggtgggatggagctgggcagaaggaaaaaagggctctgtgaggaagccgggatcacaccacctgaaggcaatagggagagcacaggcctagtgcagcaggaaggagccctgngtctccatagttaggctgtgccctgtgggagaagccaggccccacctcttctctttgggtgaactgttgacgtgactatgtgactgtctccagatg

SEQ ID NO: 126 - DNA, 453 bp, Homo sapiens
gctgcaacaccctccacctcaatttaattaaggcgtttatttaaaattatcaattaacacagtcggtaaagataaggaaaaagtcagaaggcaccaccccatcaccacccaactgcagtgtggtatccaaggccacaacttgtgggtggtgaccgcagcttcagagatcagatccttccatctttcaccttcatcccgcttcagacgctttaaaagtatcttttgccatgttaccagatccgggaaatcaatgctacaaatgttcaccttcccagagaagaaaaatgatttttctggctgcccggtccggccgcgcgggcggggacgcggagagggcgcggtgcggagcgcggggcggcgcggataggcccgggctggggccgggccgggcggtcccggccgtggcggggtccctgccctgggccgagtggcgccgggcctcgtgccgaattc

SEQ ID NO: 127 - DNA, 2055 bp, Homo sapiens
atgagttctgaatgtgatggtggttccaaagctgttatgaatggcttggcatctggcagcaatgggcaagacaaagacatggatcctacaaaaatctgcactgggaagggagcggtgactctccgggcctcgtcttcctacagggaaaccccaagcagtagccctgcgagccctcaggaaacccggcaacacgaaagcaaaccaggtgaatggaaactttcttccagtgctgatgccaatggaaatgcccagccctcttcactcgctgtcaagggctctagaagtgtgcatcccaaccttccttctgacaagtcccaggattccagtcctctactaaatgaagtttcttcttcccttattggaactgattcccaagccttttcatcagaatgcaagccttcatccgcctatccctccacaacgattgtcaatcctacaattgtgctcttgcaacacaatcgagaacagcaaaaacgactcagtagcctttcagatcctgtctcagaaagaagagtgggagagcaggactcagcaccaacccaggaaaaacccacctcacctggcaaggctattgaaaaaagagcaaaggatgacagtaggcgggtggtgaagagcactcaggacttaagcgatgtttccatggatgaagtgggcatcccactccggaacactgagagatcaaaagactggtacaagactatgtttaaacagatccacaaactgaacagagatgatgattcagatctgtactctcccagatactcattttccgaagacacaaaatctcccctttctgtgcctcgctcaaaaagtgagatgagctacattgacggtgtgaaggtagtcaagaggtcggccacactacccctcccagcccgctcttcctcactgaagtcaagctcagaaagaaatgactgggaacccccagataagaaagtagatacaagaaaatatcgtgcagagcccaagagcatttacgaatatcagcctggcaagtcttccgttctgaccaacgaaaagatgagctcagccatcagccctactccgggaatttcttcagagactcctggatatatatattcttccaacttccacgcagtgaagagggaatcagacggggctcctggggatctcactagcttggagaatgagagccaaatttataaaagtgtcttggaaggtggtgtcatccctcttcaggacctgagtgggctcaagcgaccatccagctctgcttccactaaaaattcagaatcgccaagacattttataccagctgattacttggaatccacggaagaatttattcgaagacgtcatgatgataaagagatgagacctgccagagccaaatttgactttaaagctcagacactaaaggagcttcctctgcagaagggagatattgtttacatttataagcaaattgatcagaactggtatgaaggagaacaccacggccgggtgggaatcttcccacgcacctacatcgagcttcttcctcctgctgagaaggcacagcccaaaaagttgacaccagtgcaggttttggaatatggagaagctattgctaagtttaactttaatggtgatacacaagtagaaatgtccttcagaaagggtgagaggatcacactgctccggcaggtagatgagaactggtacgaagggaggatcccggggacatcccgacaaggcatcttccccatcacctacgtggatgtgatcaagcgaccactggtgaaaaaccctgtggattacatggacctgcctttctcctcctccccaagtcgcagtgccactgcaagcccacagcaacctcaagcccagcagcgaagagtcacccccgacaggagtcaaacctcacaagatttatttagctatcaagcattatatagctatataccacagaatgatgatgagttggaactccgcgatggagatatcgttgatgtcatggaaaaatgtgacgatggatggtttgttggtacttcaagaaggacaaagcagtttggtacttttccaggcaactatgtaaaacctttgtatctataa

SEQ ID NO: 128 - DNA, 1735 bp, Homo sapiens
gacagaggcgcggaggctcggagagagaagacgtggagggagggacagagcctggacagcggtggacacggcatcgtgcgcggggaagagggcagcacgcagcaggcgccgagcgccgggcaccgggaagggcagcccgggtgatctccggccgtccatgcacagagcgccttcccccacagccgagcagccgccgggcggaggggacagcgcccgccggaccctgcagcccagactcaagcccagtgcccgagccatggcactgcctcggacgctgggggagctgcagctgtaccgggtcctgcagcgcgccaacctcctttcctactatgagaccttcatccagcagggaggggacgacgtgcagcagctgtgtgaggcgggtgaggaggagtttctggagatcatggcacttgtgggcatggccaccaagcccctccatgtccggcgcctgcagaaggcactgagagagtgggccaccaatccagggctcttcagtcaaccagtgcctgctgttcccgtctccagcatcccgctcttcaagatctctgagactgcgggtacccggaaagggagcatgagcaatgggcatggcagcccaggggaaaaggcaggcagtgcccgcagttttagccccaagagcccccttgaacttggagagaagctatcaccactgcctgggggacctggggcaggggacccccggatctggccaggccggagcactccagagtcggacgttggggcaggaggagaagaggaggctggctcgccccccttctccccccctgcagggggaggagtccctgaggggactggggctggggggctggcagcaggtgggactgggggtggtccagaccgactggagccagagatggtacgcatggtggtggaaagtgtggagaggatcttccggagcttcccaaggggggatgctggggaggtcacatccctgctaaagctgaataagaagctggcacggagcgttgggcacatctttgagatggatgataatgacagccagaaggaagaggagatccgcaaatacagcatcatctatggccgtttcgactctaagcggcgggagggcaagcagctcagcctgcacgagctcaccatcaacgaggctgctgcccagttctgcatgagggacaacacgctcttattacggagagtggagctcttctctttgtcccgccaagtagcccgagagagcacctacttgtcctccttgaagggctccaggcttcaccctgaagaactgggaggccctccactgaagaagctgaaacaagaggttggagaacagagtcaccctgaaatccagcagcctcccccaggccctgagtcctatgtacccccataccgccccagcctggaggaggacagcgccagcctgtctggggagagtctggatggacatttgcaggctgtggggtcatgtccaaggctgacgccgccccctgctgacctgcctctggcattgccagcccatgggctatggagccgacacatcctgcagcagacactgatggacgaggggctgcggctcgcccgcctcgtctcccacgaccgcgtgggccgcctcagcccctgtgtgcctgcgaagccacctctcgcagagttcgaggaagggctgctggacagatgtcctgccccaggaccccatcccgcgctggtggagggtcgcaggagcagcgtgaaagtggaggctgaggccagccggcagtga

SEQ ID NO: 129 - DNA, 865 bp, Homo sapiens
aataaacacttgcccagacccctttgtgtgggggaattggggaggggtcgtggcaggcagggtgggccacggaactgggtcccaggcatcaaggccacgtgcagggccatggagggatgcttctcacgaggcgcttcagaagcgagcgaagggacagagaagccctgcgtccaagggccttttgtcctgttagcaattgaggtgtgcagagcactgtacagaccccactcccctgtacattcctccctggaggtgcccggtccccgcttggggatgggagttttgtagactgtacagaaatcggcaccctattttcttgcagctcagattttgttaatctggaatatacagacagacgtaaagtgttttagcaaaatggaaacaaacagttgtgcctttttcctcttttggtttggtttgggtttggcctggggctggtcccagttggtgcggggcatgctgggggcaggaggggcaggacgggccaggtggagtcaggtcttgggggtgtcatgtcggggtgctgccagcgtcccttggtcctgtgcctttggagcctcgggctcctggggtgcagggtgcttggggggtggctgtttggagcccaccgaacgccaggcagggcctggaggccagcgcacttgcaggtgtctcccttgattttggttcctaagcagatcccccctactgggggttccggaagagtccctgggcagtggtggcctctcttccattctgggtggctcttgggcccgtgtgatgacctctttcttgggttggactggcctgtgggttgtgtgagaaccgcttgggccttttcgttgctggcaggacttgttaacatcgcccacgtgtctccgcgtca

SEQ ID NO: 130 - protein, 582 aa, Homo sapiens [sequence omitted]

SEQ ID NO: 131 - protein, 2871 aa, Homo sapiens [sequence omitted]

SEQ ID NO: 132 - protein, 537 aa, Homo sapiens [sequence omitted]

SEQ ID NO: 133 - protein, 122 aa, Homo sapiens
MEASALTSSAVTSVAKVVRVASGSAVVLPLARIATVVIGGVVAMAAVPMVLSAMGFTAAGIASSSIAAKMMSAAAIANGGGVASGSLVGTLQSLGATGLSGLTKFILGSIGSAIAAVIARFY

SEQ ID NO: 134 - protein, 537 aa, Homo sapiens [sequence omitted]

SEQ ID NO: 135 - protein, 201 aa, Homo sapiens [sequence omitted]

SEQ ID NO: 136 - protein, 541 aa, Homo sapiens
MGHSPPVLPLCASVSLLGGLTFGYELAVISGALLPLQLDFGLSCLEQEFLVGSLLLGALLASLVGGFLIDCYGRKQAILGSNLVLLAGSLTLGLAGSLAWLVLGRAVVGFAISLSSMACCIYVSELVGPRQRGVLVSLYEAGITVGILLSYALNYALAGTPWGWRHMFGWATAPAVLQSLSLLFLPAGTDETATHKDLIPLQGGEAPKLGPGRPRYSFLDLFRARDNMRGRTTVGLGLVLFQQLTGQPNVLCYASTIFSSVGFHGGSSAVLASVGLGAVKVAATLTAMGLVDRAGRRALLLAGCALMALSVSGIGLVSFAVPMDSGPSCLAVPNATGQTGLPGDSGLLQDSSLPPIPRTNEDQREPILSTAKKTKPHPRSGDPSAPPRLALSSALPGPPLPARGHALLRWTALLCLMVFVSAFSFGFGPVTWLVLSEIYPVEIRGRAFAFCNSFNWAANLFISLSFLDLIGTIGLSWTFLLYGLTAVLGLGFIYLFVPETKGQSLAEIDQQFQKRRFTLSFGHRQNSTGIPYSRIEISAAS

SEQ ID NO: 137 - protein, 882 aa, Homo sapiens
MEPAPARSPRPQQDPARPQEPTMPPPETPSEGRQPSPSPSPTERAPASEEEFQFLRCQQCQAEAKCPKLLPCLHTLCSGCLEASGMQCPICQAPWPLGADTPALDNVFFESLQRRLSVYRQIVDAQAVCTRCKESADFWCFECEQLLCAKCFEAHQWFLKHEARPLAELRNQSVREFLDGTRKTNNIFCSNPNHRTPTLTSIYCRGCSKPLCCSCALLDSSHSELKCDISAEIQQRQEELDAMTQALQEQDSAFGAVHAQMHAAVGQLGRARAETEELIRERVRQVVAHVRAQERELLEAVDARYQRDYEEMASRLGRLDAVLQRIRTGSALVQRMKCYASDQEVLDMHGFLRQALCRLRQEEPQSLQAAVRTDGFDEFKVRLQDLSSCITQGKDAAVSKKASPEAASTPRDPIDVDLPEEAERVKAQVQALGLAEAQPMAVVQSVPGAHPVPVYAFSIKGPSYGEDVSNTTTAQKRKCSQTQCPRKVIKMESEEGKEARLARSSPEQPRPSTSKAVSPPHLDGPPSPRSPVIGSEVFLPNSNHVASGAGEAEERVVVISSSEDSDAENSSSRELDDSSSESSDLQLEGPSTLRVLDENLADPQAEDRPLVFFDLKIDNETQKISQLAAVNRESKFRVVIQPEALFSIYSKAVSLEVGLQHFLSFLSSMRRPILACYKLWGPGLPNFFRALEDINRLWEFQEAISGFLAALPLIRERVPGASSFKLKNLAQTYLARNMSERSAMAAVLAMRDLCRLLEVSPGPQLAQHVYPFSSLQCFASLQPLVQAAVLPRAEARLLALHNVSFMELLSAHRRDRQGGLKKYSRYLSLQTTTLPPAQPAFNLQALGTYFEGLLEGPALARAEGVSTPLAGRGLAERASQQS

SEQ ID NO: 138 - protein, 449 aa, Homo sapiens
MYQTLAALSSQGPAAYDGAPGGFVHSAAAAAAAAAAASSPVYVPTTRVGSMLPGLPYHLQGSGSGPANHAGGAGAHPGWPQASADSPPYGSGGGAAGGGAAGPGGAGSAAAHVSARFPYSPSPPMANGAAREPGGYAAAGSGGAGGVSGGGSSLAAMGGREPQYSSLSAARPLNGTYHHHHHHHHHHPSPYSPYVGAPLTPAWPAGPFETPVLHSLQSRAGAPLPVPRGPSADLLEDLSESRECVNCGSIQTPLWRRDGTGHYLCNACGLYSKMNGLSRPLIKPQKRVPSSRRLGLSCANCHTTTTTLWRRNAEGEPVCNACGLYMKLHGVPRPLAMKKEGIQTRKRKPKNINKSKTCSGNSNNSIPMTPTSTSSNSDDCSKNTSPTTQPTASGAGAPVMTGAGESTNPENSELKYSGQDGLYIGVSLASPAEVTSSVRPDSWCALALA

SEQ ID NO: 139 - protein, 295 aa, Homo sapiens
METPAWPRVPRPETAVARTLLLGWVFAQVAGASGTTNTVAAYNLTWKSTNFKTILEWEPKPVNQVYTVQISTKSGDWKSKCFYTTDTECDLTDEIVKDVKQTYLARVFSYPAGNVESTGSAGEPLYENSPEFTPYLETNLGQPTIQSFEQVGTKVNVTVEDERTLVRRNNTFLSLRDVFGKDLIYTLYYWKSSSSGKKTAKTNTNEFLIDVDKGENYCFSVQAVIPSRTVNRKSTDSPVECMGQEKGEFREIFYIIGAVVFVVIILVIILAISLHKCRKAGVGQSWKENSPLNVS

SEQ ID NO: 140 - protein, 432 aa, Homo sapiens
MTELQQDVEDTKPAKVLGKRESKLGSAHSEAENGVEEKKKACRSPTAQSPTPSVEADSPDQKKIISLWSKSSFDGASLASDKNDCKTESKNDPKTERKKSSSSSQYKANMHFHKLFLSVPTEEPLKQSFTCALQKEILYQGKLFVSENWICFHSKVFGKDTKISIPAFSVTLIKKTKTALLVPNALIIATVTDRYIFVSLLSRDSTYKLLKSVCGHLENTSVGNSPNPSSAENSFRADRPSSLPLDFNDEFSDLDGVVQQRRQDMEGYSSSGSQTPESENSRDFHATESQTVLNVSKGEAKPTRADAHVNRVPEGKAKSLPVQGLSETVGILHKVKSQKCPMLHHILIFYAIVVCALIISTFYMRYRINTLEEQLGLLTSIVDTHNTEQAAPSGLRSQVQFNVEVLCQELTANIVKLEKIQNNLQKLLENGD

SEQ ID NO: 141 - protein, 980 aa, Homo sapiens
MALAVLRVLEPFPTETPPLAVLLPPGGPWPAAELGLVLALRPAGESPAGPALLVAALEGPDAGTEEQGPGPPQLLVSRALLRLLALGSGAWVRARAVRRPPALGWALLGTSLGPGLGPRVGPLLVRRGETLPVPGPRVLETRPALQGLLGPGTRLAVTELRGRARLCPESGDSSRPPPPPVVSSFAVSGTVRRLQGVLGGTGDSLGVSRSCLRGLGLFQGEWVWVAQARESSNTSQPHLARVQVLEPRWDLSDRLGPGSGPLGEPLADGLALVPATLAFNLGCDPLEMGELRIQRYLEGSIAPEDKGSCSLLPGPPFARELHIEIVSSPHYSTNGNYDGVLYRHFQIPRVVQEGDVLCVPTIGQVEILEGSPEKLPRWREMFFKVKKTVGEAPDGPASAYLADTTHTSLYMVGSTLSPVPWLPSEESTLWSSLSPPGLEALVSELCAVLKPRLQPGGALLTGTSSVLLRGPPGCGKTTVVAAACSHLGLHLLKVPCSSLCAESSGAVETKLQAIFSRARRCRPAVLLLTAVDLLGRDRDGLGEDARVMAVLRHLLLNEDPLNSCPPLMVVATTSRAQDLPADVQTAFPHELEVPALSEGQRLSILRALTAHLPLGQEVNLAQLARRCAGFVVGDLYALLTHSSRAACTRIKNSGLAGGLTEEDEGELCAAGFPLLAEDFGQALEQLQTAHSQAVGAPKIPSVSWHDVGGLQEVKKEILETIQLPLEHPELLSLGLRRSGLLLHGPPGTGKTLLAKAVATECSLTFLSVKGPELINMYVGQSEENVREVFARARAAAPCIIFFDELDSLAPSRGRSGDSGGVMDRVVSQLLAELDGLHSTQDVFVIGATNRPDLLDPALLRPGRFDKLVFVGANEDRASQLRVLSAITRKFKLEPSVSLVNVLDCCPPQLTGADLYSLCSDAMTAALKRRVHDLEEGLEPGSSALMLTMEDLLQAAARLQPSVSEQELLRYKRIQRKFAAC

SEQ ID NO: 142 - protein, 447 aa, Homo sapiens
MQVQRGDPIYVTELTHRIRSKSSPDENENEDSADFVSFFPDFVWTLRDFSLDLEADGQPLTPDEYLEYSLKLTQGTSQKDKNFNLPRLCIRKFFPKKKCFVFDLPIHRRKLAQLEKLQDEELDPEFVQQVADFCSYIFSNSKTKTLSGGIKVNGPRLESLVLTYIKAISRGDLPCMENAVLALAQIENSAAVQKAIAHYDQQMGQKVQLPAETLQELLDLHRVSEREATEVYMKNSFKDVDHLFQKKLAAQLDKKRDDFCKQNQEASSDRCSALLQVIFSPLEEEVKAGIYSKPGGYCLFIQKLQDLEKKYYEEPRKGIQAEEILQTYLKSKESVTDAILQTDQILTEKEKEIEVECVKAESAQASAKMVEEMQIKYQQMMEEKEKSYQEHVKQLTEKMERERAQLLEEQEKTLTSKLQEQARVLKERCQGESTQLQNEIQKLQKTL

SEQ ID NO: 143 - protein, 376 aa, Homo sapiens
MSKSVPAFLQDESDDRETDTASESSYQLSRHKKSPSSLTNLSSSSGMTSLSSVSGSVMSVYSGDFGNLEVKGNIQFAIEYVESLKELHVFVAQCKDLAAADVKKQRSDPYVKAYLLPDKGKMGKKKTLVVKKTLNPVYNEILRYKIEKQILKTQKLNLSIWHRDTFKRNSFLGEVELDLETWDWDNKQNKQLRWYPLKRKTAPVALEAENRGEMKLALQYVPEPVPGKKLPTTGEVHIWVKECLDLPLLRGSHLNSFVKCTILPDTSRKSRQKTRAVGKTTNPIFNHTMVYDGFRPEDLMEACVELTVWDHYKLTNQFLGGLRIGFGTGKSYGTEVDWMDSTSEEVALWEKMVNSPNTWIEATLPLRMLLIAKISK

SEQ ID NO: 144 - protein, 248 aa, Homo sapiens
MQTCPLAFPGHVSQALGTLLFLAASLSAQNEGWDSPICTEGVVSVSWGENTVMSCNISNAFSHVNIKLRAHGQESAIFNEVAPGYFSRDGWQLQVQGGVAQLVIKGARDSHAGLYMWHLVGHQRNNRQVTLEVSGAEPQSAPDTGFWPVPAVVTAVFILLVALVMFAWYRCRCSQQRREKKFFLLEPQMKVAALRAGAQQGLSRASAELWTPDSEPTPRPLALVFKPSPLGALELLSPQPLFPYAADP

SEQ ID NO: 145 - protein, 917 aa, Homo sapiens
MEGAGENAPESSSSAPGSEESARDPQVPPPEEESGDCARSLEAVPKKLCGYLSKFGGKGPIRGWKSRWFFYDERKCQLYYSRTAQDANPLDSIDLSSAVFDCKADAEEGIFEIKTPSRVITLKAATKQAMLYWLQQLQMKRWEFHNSPPAPPATPDAALAGNGPVLHLELGQEEAELEEFLCPVKTPPGLVGVAAALQPFPALQNISLKHLGTEIQNTMHNIRGNKQAQGTGHEPPGEDSPQSGEPQREEQPLASDASTPGREPEDSPKPAPKPSLTISFAQKAKRQNNTFPFFSEGITRNRTAQEKVAALEQQVLMLTKELKSQKELVKILHKALEAAQQEKRASSAYLAAAEDKDRLELVRHKVRQIAELGRRVEALEQERESLAHTASLREQQVQELQQHVQLLMDKNHAKQQVICKLSEKVTQDFTHPPDQSPLRPDAANRDFLSQQGKIEHLKDDMEAYRTQNCFLNFEIHQVTKIWRKVAEKEKALLTKCAYLQARNCQVESKYLAGLRRLQEALGDEASECSELLRQLVQEALQWEAGEASSDSIELSPISKYDEYGFLTVPDYEVEDLKLLAKIQALESRSHHLLGLEAVDRPLRERWAALGDLVPSAELKQLLRAGVPREHRPRVWRWLVHLRVQHLHTPGCYQELLSRGQAREHPAARQIELDLNRTFPNNKHFTCPTSSFPDKLRRVLLAFSWQNPTIGYCQGLNRLAAIALLVLEEEESAFWCLVAIVETIMPADYYCNTLTASQVDQRVLQDLLSEKLPRLMAHLGQHHVDLSLVTFNWFLVVFADSLISNILLRVWDAFLYEGTKYNEKEILRLQNGLEIYQYLRFFTKTISNSRKLMNIAFNDMNPFRMKQLRQLRMVHRERLEAELRELEQLKAEYLERRASRRRAVSEGCASEDEVEGEA

SEQ ID NO: 146 - protein, 195 aa, Homo sapiens
MGRARDAILDALENLTAEELKKFKLKLLSVPLREGYGRIPRGALLSMDALDLTDKLVSFYLETYGAELTANVLRDMGLQEMAGQLQAATHQGSGAAPAGIQAPPQSAAKPGLHFIDQHRAALIARVTNVEWLLDALYGKVLTDEQYQAVRAEPTNPSKMRKLFSFTPAWNWTCKDLLLQALRESQSYLVEDLERS

SEQ ID NO: 147 - protein, 157 aa, Homo sapiens
MLVLLAGIFVVHIATVIMLFVSTIANVWLVSNTVDASVGLWKNCTNISCSDSLSYASEDALKTVQAFMILSIIFCVIALLVFVFQLFTMEKGNRFFLSGATTLVCWLCILVGVSIYTSHYANRDGTQYHHGYSYILGWICFCFSFIIGVLYLVLRKK

SEQ ID NO: 148 - protein, 1066 aa, Homo sapiens
MGPGPSRAPRAPRLMLCALALMVAAGGCVVSAFNLDTRFLVVKEAGNPGSLFGYSVALHRQTERQQRYLLLAGAPRELAVPDGYTNRTGAVYLCPLTAHKDDCERMNITVKNDPGHHIIEDMWLGVTVASQGPAGRVLVCAHRYTQVLWSGSEDQRRMVGKCYVRGNDLELDSSDDWQTYHNEMCNSNTDYLETGMCQLGTSGGFTQNTVYFGAPGAYNWKGNSYMIQRKEWDLSEYSYKDPEDQGNLYIGYTMQVGSFILHPKNITIVTGAPRHRHMGAVFLLSQEAGGDLRRRQVLEGSQVGAYFGSAIALADLNNDGWQDLLVGAPYYFERKEEVGGAIYVFMNQAGTSFPAHPSLLLHGPSGSAFGLSVASIGDINQDGFQDIAVGAPFEGLGKVYIYHSSSKGLLRQPQQVIHGEKLGLPGLATFGYSLSGQMDVDENFYPDLLVGSLSDHIVLLRARPVINIVHKTLVPRPAVLDPALCTATSCVQVELCFAYNQSAGNPNYRRNITLAYTLEADRDRRPPRLRFAGSESAVFHGFFSMPEMRCQKLELLLMDNLRDKLRPIIISMNYSLPLRMPDRPRLGLRSLDAYPILNQAQALENHTEVQFQKECGPDNKCESNLQMRAAFVSEQQQKLSRLQYSRDVRKLLLSINVTNTRTSERSGEDAHEALLTLVVPPALLLSSVRPPGACQANETIFCELGNPFKRNQRMELLIAFEVIGVTLHTRDLQVQLQLSTSSHQDNLWPMILTLLVDYTLQTSLSMVNHRLQSFFGGTVMGESGMKTVEDVGSPLKYEFQVGPMGEGLVGLGTLVLGLEWPYEVSNGKWLLYPTEITVHGNGSWPCRPPGDLINPLNLTLSDPGDRPSSPQRRRRQLDPGGGQGPPPVTLAAAKKAKSETVLTCATGRAHCVWLECPIPDAPVVTNVTVKARVWNSTFIEDYRDFDRVRVNGWATLFLRTSIPTINMENKTTWFSVDIDSELVEELPAEIELWLVLVAVGAGLLLLGLIILLLWKCGFFKRTRYYQIMPKYHAVRIREEERYPPPGSTLPTKKHWVTSWQTRDQYY

SEQ ID NO: 149 - protein, 688 aa, Homo sapiens
MWCIVLFSLLAWVYAEPTMYGEILSPNYPQAYPSEVEKSWDIEVPEGYGIHLYFTHLDIELSENCAYDSVQIISGDTEEGRLCGQRSSNNPHSPIVEEFQVPYNKLQVIFKSDFSNEERFTGFAAYYVATDINECTDFVDVPCSHFCNNFIGGYFCSCPPEYFLHDDMKNCGVNCSGDVFTALIGEIASPNYPKPYPENSRCEYQIRLEKGFQVVVTLRREDFDVEAADSAGNCLDSLVFVAGDRQFGPYCGHGFPGPLNIETKSNALDIIFQTDLTGQKKGWKLRYHGDPMPCPKEDTPNSVWEPAKAKYVFRDVVQITCLDGFEVVEGRVGATSFYSTCQSNGKWSNSKLKCQPVDCGIPESIENGKVEDPESTLFGSVIRYTCEEPYYYMENGGGGEYHCAGNGSWVNEVLGPELPKCVPVCGVPREPFEEKQRIIGGSDADIKNFPWQVFFDNPWAGGALINEYWVLTAAHVVEGNREPTMYVGSTSVQTSRLAKSKMLTPEHVFIHPGWKLLEVPEGRTNFDNDIALVRLKDPVKMGPTVSPICLPGTSSDYNLMDGDLGLISGWGRTEKRDRAVRLKAARLPVAPLRKCKEVKVEKPTADAEAYVFTPNMICAGGEKGMDSCKGDSGGAFAVQDPNDKTKFYAAGLVSWGPQCGTYGLYTRVKNYVDWIMKTMQENSTPRED

SEQ ID NO: 150 - protein, 144 aa, Homo sapiens
SRIDCLRQADKVWRLDLVMVILFKGIPLESTDGERLYKSPQCSNPGLCVQPHHIGVTIKELDLYLAYFVHTPESGQSDSSNQQGDADIKPLPNGHLSFQDCFVTSGVWNVTELVRYHRLLLQQHQGPTSPWRTWRVPATTTSTR

SEQ ID NO: 151 - protein, 383 aa, Homo sapiens
MAGIPGLLFLLFFLLCAVGQVSPYSAPWKPTWPAYRLPVVLPQSTLNLAKPDFGAEAKLEVSSSCGPQCHKGTPLPTYEEAKQYLSYETLYANGSRTETQVGIYILSSSGDGAQHRDSGSSGKSRRKRQIYGYDSRFSIFGKDFLLNYPFSTSVKLSTGCTGTLVAEKHVLTAAHCIHDGKTYVKGTQKLRVGFLKPKFKDGGRGANDSTSAMPEQMKFQWIRVKRTHVPKGWIKGNANDIGMDYDYALLELKKPHKRKFMKIGVSPPAKQLPGGRIHFSGYDNDRPGNLVYRFCDVKDETYDLLYQQCDAQPGASGSGVYVRMWKRQQQKWERKIIGIFSGHQWVDMNGSPQDFNVAVRITPLKYAQICYWIKGNYLDCREG

SEQ ID NO: 152 - protein, 381 aa, Homo sapiens [sequence omitted]

SEQ ID NO: 153 - protein, 562 aa, Homo sapiens
MDAMKRGLCCVLLLCGAVFVSPSQEIHARFRRGARSYQVICRDEKTQMIYQQHQSWLRPVLRSNRVEYCWCNSGRAQCHSVPVKSCSEPRCFNGGTCQQALYFSDFVCQCPEGFAGKCCEIDTRATCYEDQGISYRGTWSTAESGAECTNWNSSALAQKPYSGRRPDAIRLGLGNHNYCRNPDRDSKPWCYVFKAGKYSSEFCSTPACSEGNSDCYFGNGSAYRGTHSLTESGASCLPWNSMILIGKVYTAQNPSAQALGLGKHNYCRNPDGDAKPWCHVLKNRRLTWEYCDVPSCSTCGLRQYSQPQFRIKGGLFADIASHPWQAAIFAKHRRSPGERFLCGGILISSCWILSAAHCFQERFPPHHLTVILGRTYRVVPGEEEQKFEVEKYIVHKEFDDDTYDNDIALLQLKSDSSRCAQESSVVRTVCLPPADLQLPDWTECELSGYGKHEALSPFYSERLKEAHVRLYPSSRCTSQHLLNRTVTDNMLCAGDTRSGGPQANLHDACQGDSGGPLVCLNDGRMTLVGIISWGLGCGQKDVPGVYTKVTNYLDWIRDNMRP

SEQ ID NO: 154 - protein, 196 aa, Homo sapiens
MGGRGRGRAPERVGGRGRGRGTAAPRAAPAARGSRPGPAGTMAAGSITTLPALPEDGGSGAFPPGHFKDPKRLYCKNGGFFLRIHPDGRVDGVREKSDPHIKLQLQAEERGVVSIKGVCANRYLAMKEDGRLLASKCVTDECFFFERLESNNYNTYRSRKYTSWYVALKRTGQYKLGSKTGPGQKAILFLPMSAKS

SEQ ID NO: 155 - protein, 1055 aa, Homo sapiens
MALRRLGAALLLLPLLAAVEETLMDSTTATAELGWMVHPPSGWEEVSGYDENMNTIRTYQVCNVFESSQNNWLRTKFIRRRGAHRIHVEMKFSVRDCSSIPSVPGSCKETFNLYYYEADFDSATKTFPNWMENPWVKVDTIAADESFSQVDLGGRVMKINTEVRSFGPVSRSGFYLAFQDYGGCMSLIAVRVFYRKCPRIIQNGAIFQETLSGAESTSLVAARGSCIANAEEVDVPIKLYCNGDGEWLVPIGRCMCKAGFEAVENGTVCRGCPSGTFKANQGDEACTHCPINSRTTSEGATNCVCRNGYYRADLDPLDMPCTTIPSAPQAVISSVNETSLMLEWTPPRDSGGREDLVYNIICKSCGSGRGACTRCGDNVQYAPRQLGLTEPRIYISDLLAHTQYTFEIQAVNGVTDQSPFSPQFASVNITTNQAAPSAVSIMHQVSRTVDSITLSWSQPDQPNGVILDYELQYYEKELSEYNATAIKSPTNTVTVQGLKAGAIYVFQVRARTVAGYGRYSGKMYFQTMTEAEYQTSIQEKLPLIIGSSAAGLVFLIAVVVIAIVCNRRGFERADSEYTDKLQHYTSGHMTPGMKIYIDPFTYEDPNEAVREFAKEIDISCVKIEQVIGAGEFGEVCSGHLKLPGKREIFVAIKTLKSGYTEKQRRDFLSEASIMGQFDHPNVIHLEGVVTKSTPVMIITEFMENGSLDSFLRQNDGQFTVIQLVGMLRGIAAGMKYLADMNYVHRDLAARNILVNSNLVCKVSDFGLSRFLEDDTSDPTYTSALGGKIPIRWTAPEAIQYRKFTSASDVWSYGIVMWEVMSYGERPYWDMTNQDVINAIEQDYRLPPPMDCPSALHQLMLDCWQKDRNHRPKFGQIVNTLDKMIRNPNSLKAMAPLSSGINLPLLDRTIPDYTSFNTVDEWLEAIKMGQYKESFANAGFTSFDVVSQMMMEDILRLGVTLAGHQKKILNSIQVMRAQMNQIQSVEGQPLARRPRATGRTKRCQPRDVTKKTCNSNDGKKKGMGKKKTDPGRGREIQGIFFKEDSHKESNDCSCGG

SEQ ID NO: 156 - protein, 472 aa, Homo sapiens
MSENNKNSLESSLRQLKCHFTWNLMEGENSLDDFEDKVFYRTEFQNREFKATMCNLLAYLKHLKGQNEAALECLRKAEELIQQEHADQAEIRSLVTWGNYAWVYYHMGRLSDVQIYVDKVKHVCEKFSSPYRIESPELDCEEGWTRLKCGGNQNERAKVCFEKALEKKPKNPEFTSGLAIASYRLDNWPPSQNAIDPLRQAIRLNPDNQYLKVLLALKLHKMREEGEEEGEGEKLVEEALEKAPGVTDVLRSAAKFYRRKDEPDKAIELLKKALEYIPNNAYLHCQIGCCYRAKVFQVMNLRENGMYGKRKLLELIGHAVAHLKKADEANDNLFRVCSILASLHALADQYEDAEYYFQKEFSKELTPVAKQLLHLRYGNFQLYQMKCEDKAIHHFIEGVKINQKSREKEKMKDKLQKIAKMRLSKNGADSEALHVLAFLQELNEKMQQADEDSERGLESGSLIPSASSWNGE

SEQ ID NO: 157 - protein, 493 aa, Homo sapiens
MLKALFLTMLTLALVKSQDTEETITYTQCTDGYEWDPVRQQCKDIDECDIVPDACKGGMKCVNHYGGYLCLPKTAQIIVNNEQPQQETQPAEGTSGATTGVVAASSMATSGVLPGGGFVASAAAVAGPEMQTGRNNFVIRRNPADPQRIPSNPSHRIQCAAGYEQSEHNVCQDIDECTAGTHNCRADQVCINLRGSFACQCPPGYQKRGEQCVDIDECTIPPYCHQRCVNTPGSFYCQCSPGFQLAANNYTCVDINECDASNQCAQQCYNILGSFICQCNQGYELSSDRLNCEDIDECRTSSYLCQYQCVNEPGKFSCMCPQGYQVVRSRTCQDINECETTNECREDEMCWNYHGGFRCYPRNPCQDPYILTPENRCVCPVSNAMCRELPQSIVYKYMSIRSDRSVPSDIFQIQATTIYANTINTFRIKSGNENGEFYLRQTSPVSAMLVLVKSLSGPREHIVDLEMLTVSSIGTFRTSSVLRLTIIVGPFSF

SEQ ID NO: 158 - protein, 400 aa, Homo sapiens
MPLSMRYLFIISVSSVIIFIVFSVFNFGGDPSFQRLNISDPLRLTQVCTSFINGKTRFLWKNKLMIHEKSSCKEYLTQSHYITAPLSKEEADFPLAYIMVIHHHFDTFARLFRAIYMPQNIYCVHVDEKATTEFKDAVEQLLSCFPNAFLASKMEPVVYGGISRLQADLNCIRDLSAFEVSWKYVINTCGQDFPLKTNKEIVQYLKGFKGKNITPGVLPPAHAIGRTKYVHQEHLGKELSYVIRTTALKPPPPHNLTIYFGSAYVALSREFANFVLHDPRAVDLLQWSKDTFSPDEHFWVTLNRIPGVPGSMPNASWTGNLRAIKWSDMEDRHGGCHGHYVHGICIYGNGDLKWLVNSPSLFANKFELNTYPLTVECLELRHRERTLNQSETAIQPSWYF

SEQ ID NO: 159 - protein, 357 aa, Homo sapiens
MATTVPDGCRNGLKSKYYRLCDKAEAWGIVLETVATAGVVTSVAFMLTLPILVCKVQDSNRRKMLPTQFLFLLGVLGIFGLTFAFIIGLDGSTGPTRFFLFGILFSICFSCLLAHAVSLTKLVRGRKPLSLLVILGLAVGFSLVQDVIAIEYIVLTMNRTNVNVFSELSAPRRNEDFVLLLTYVLFLMALTFLMSSFTFCGSFTGWKRHGAHIYLTMLLSIAIWVAWITLLMLPDFDRRWDDTILSSALAANGWVFLLAYVSPEFWLLTKQRNPMDYPVEDAFCKPQLVKKSYGVENRAYSQEEITQGFEETGDTLYAPYSTHFQLQNQPPQKEFSIPRAHAWPSPYKDYEVKKEGS

SEQ ID NO: 160 - protein, 517 aa, Homo sapiens
VANFDAIVDIQNEIISQVCSGVDEQLGELVSGEEVVEPPSNLIAMEVSSKYVKLNWNPSPSPVTGYKVILTPMTAGSRQHALSVGPQTTTLSVRDLSADTEYQISVSAMKGMTSSEPISIMEKTQPMKVQVECSRGVDIKADMFLVDGSYSIGIANFVKVRAFLEVLVKSFEISPNRVQISLVQYSRDPHTEFTLKKFTKVEDIIEAINTFPYRGGSTNTGKAMTYVREKIFVPSKGSRSNVPKVMILITDGKSSDAFRDPAIKLRNSDVEIFAVGVKDAVDSELEAIASPPAETHVFTVEDFDAFQRISFELTQSICLRIEQELAAIKKKAYVPPKDLSFSEVTSYGFKTNWSPAGENVFSYHITYKEAAGDDEVTVVEPASSTSVVLNSLKPETLYLVNVTAEYEDGFSIPLAGEETTEEVKGAPRNLKVTDETTDSFKITSTQAPGKVLRYRIIYRPVAGGESREVTTPPNQRRRTLENLIPDTKYEVSVIPEYFSGPGTPLTGNAATEEGRGN

SEQ ID NO: 161 - protein, 204 aa, Homo sapiens
GEGERPEEDAAALELSSDEAVEVEEVIEESRAERIKRSGLRRVDDFKKAFSKEKMEKTKVRTRENLEKTRLKTKENLEKTRHTLEKRMNKLGTRLVPAERREKLKTSRDKLRKSFTPDHVVYARSKTAVYKVPPFTFHVKKIREGQVEVLKATEMVEVGADDDEGGAERGEAGDLRRGSSPDVHALLEITEESDAVLVDKSDSD

SEQ ID NO: 162 - protein, 543 aa, Homo sapiens
MGTSLSPNDPWPLNPLSIQQTTLLLLLSVLATVHVGQRLLRQRRRQLRSAPPGPFAWPLIGNAAAVGQAAHLSFARLARRYGDVFQIRLGSCPIVVLNGERAIHQALVQQGSAFADRPAFASFRVVSGGRSMAFGHYSEHWKVQRRAAHSMMRNFFTRQPRSRQVLEGHVLSEARELVALLVRGSADGAFLDPRPLTVVAVANVMSAVCFGCRYSHDDPEFRELLSHNEEFGRTVGAGSLVDVMPWLQYFPNPVRTVFREFEQLNRNFSNFILDKFLRHCESLRPGAAPRDMMDAFILSAEKKAAGDSHGGGARLDLENVPATITDIFGASQDTLSTALQWLLLLFTRYPDVQTRVQAELDQVVGRDRLPCMGDQPNLPYVLAFLYEAMRFSSFVPVTIPHATTANTSVLGYHIPKDTVVFVNQWSVNHDPVKWPNPENFDPARFLDKDGLINKDLTSRVMIFSVGKRRCIGEELSKMQLFLFISILAHQCDFRANPNEPAKMNFSYGLTIKPKSFKVNVTLRESMELLDSAVQNLQAKETCQ

SEQ ID NO: 163 - protein, 310 aa, Homo sapiens
MAATGANAEKAESHNDCPVRLLNPNIAKMKEDILYHFNLTTSRHNFPALFGDVKFVCVGGSPSRMKAFIRCVGAELGLDCPGRDYPNICAGTDRYAMYKVGPVLSVSHGMGIPSISIMLHELIKLLYYARCSNVTIIRIGTSGGIGLEPGTVVITEQAVDTCFKAEFEQIVLGKRVIRKTDLNKKLVQELLLCSAELSEFTTVVGNTMCTLDFYEGQGRLDGALCSYTEKDKQAYLEAAYAAGVRNIEMESSVFAAMCSACGLQAAVVCVTLLNRLEGDQISSPRNVLSEYQQRPQRLVSYFIKKKLSKA

SEQ ID NO: 164 - protein, 1025 aa, Homo sapiens
MAPVLSKDSADIESILALNPRTQTHATLCSTSAKKLDKKHWKRNPDKNCFNCEKLENNFDDIKHTTLGERGALREAMRCLKCADAPCQKSCPTNLDIKSFITSIANKNYYGAAKMIFSDNPLGLTCGMVCPTSDLCVGGCNLYATEEGPINIGGLQQFATEVFKAMSIPQIRNPSLPPPEKMSEAYSAKIALFGAGPASISCASFLARLGYSDITIFEKQEYVGGLSTSEIPQFRLPYDVVNFEIELMKDLGVKIICGKSLSVNEMTLSTLKEKGYKAAFIGIGLPEPNKDAIFQGLTQDQGFYTSKDFLPLVAKGSKAGMCACHSPLPSIRGVVIVLGAGDTAFDCATSALRCGARRVFIVFRKGFVNIRAVPEEMELAKEEKCEFLPFLSPRKVIVKGGRIVAMQFVRTEQDETGKWNEDEDQMVHLKADVVISAFGSVLSDPKVKEALSPIKFNRWGLPEVDPETMQTSEAWVFAGGDVVGLANTTVESVNDGKQASWYIHKYVQSQYGASVSAKPELPLFYTPIDLVDISVEMAGLKFINPFGLASATPATSTSMIRRAFEAGWGFALTKTFSLDKDIVTNVSPRIIRGTTSGPMYGPGQSSFLNIELISEKTAAYWCQSVTELKADFPDNIVIASIMCSYNKNDWTELAKKSEDSGADALELNLSCPHGMGERGMGLACGQDPELVRNICRWVRQAVQIPFFAKLTPNVTDIVSIARAAKEGGANGVTATNTVSGLMGLKSDGTPWPAVGIAKRTTYGGVSGTAIRPIALRAVTSIARALPGFPILATGGIDSAESGLQFLHSGASVLQVCSAIQNQDFTVIEDYCTGLKALLYLKSIEELQDWDGQSPATVSHQKGKPVPRIAELMDKKLPSFGPYLEQRKKIIAENKIRLKEQNVAFSPLKRSCFIPKRPIPTIKDVIGKALQYLGTFGELSNVEQVVAMIDEEMCINCGKCYMTCNDSGYQAIQFDPETHLPTITDTCTGCTLCLSVCPIVDCIKMVSRTTPYEPKRGVPLSVNPVC

SEQ ID NO: 165 - protein, 111 aa, Homo sapiens
MGLTEKLIFSLRDPAYSTFPPEGVFVNTLGLLILVFGALIFWIVTRPQWKRPKEPNSTILHPNGGTEQGARGSMPAYSGNNMDKSDSELNNEVAARKRNLALDEAGQRSTM

SEQ ID NO: 166 - protein, 630 aa, Homo sapiens
MGTYSTILIKTEVIECGNYCGVRIIHSLIAEFSLEELKKSYHLNKSQIMLDMLTENLFFDTGMGKSKFLQDMHTLLLTRHRDEHEGETGNWFSPFIEALHKDEGNEAVEAVLLESIHRFNPNAFICQALARHFYIKKKDFGNALNWAKQAKIIEPDNSYISDTLGQVYKSKIRWWIEENGGNGNISVDDLIALLDLAEHASSAFKESQQQSEDREYEVKERLYPKSKRRYDTYNIAGYQGEIEVGLYTIQILQLIPFFDNKNELSKRYMVNFVSGSSDIPGDPNNEYKLALKNYIPYLTKLKFSLKKSFDFFDEYFVLLKPRNNIKQNEEAKTRRKVAGYFKKYVDIFCLLEESQNNTGLGSKFSEPLQVERCRRNLVALKADKFSGLLEYLIKSQEDAISTMKCIVNEYTFLLEQCTVKIQSKEKLNFILANIILSCIQPTSRLVKPVEKLKDQLREVLQPIGLTYQFSEPYFLASLLFWPENQQLDQHSEQMKEYAQALKNSFKGQYKHMHRTKQPIAYFFLGKGKRLERLVHKGKIDQCFKKTPDINSLWQSGDVWKEEKVQELLLRLQGRAENNCLYIEYGINEKITIPITPAFLGQLRSGRSIEKVSFYLGFPIGGPLAYDIEIV

SEQ ID NO: 167 - protein, 863 aa, Homo sapiens
MAGPRGALLAWCRRQCEGYRGVEIRDLSSSFRDGLAFCAILHRHRPDLLDFDSLSKDNVFENNRLAFEVAEKELGIPALLDPNDMVSMSVPDCLSIMTYVSQYYNHFCSPGQAGVSPPRKGLAPCSPPSVAPTPVEPEDVAQGEELSSGSLSEQGTGQTPSSTCAACQQHVHLVQRYLADGRLYHRHCFRCRRCSSTLLPGAYENGPEEGTFVCAEHCARLGPGTRSGTRPGPFSQPKQQHQQQLAEDAKDVPGGGPSSSAPAGAEADGPKASPEARPQIPTKPRVPGKLQELASPPAGRPTPAPRKASESTTPAPPTPRPRSSLQQENLVEQAGSSSLVNGRLHELPVPKPRGTPKPSEGTPAPRKDPPWITLVQAEPKKKPAPLPPSSSPGPPSQDSRQVENGGTEEVAQPSPTASLESKPYNPFEEEEEDKEEEAPAAPSLATSPALGHPESTPKSLHPWYGITPTSSPKTKKRPAPRAPSASPLALHASRLSHSEPPSATPSPALSVESLSSESASQTAGAELLEPPAVPKSSSEPAVHAPGTPGNPVSLSTNSSLASSGELVEPRVEQMPQASPGLAPRTRGSSGPQPAKPCSGATPTPLLLVGDRSPVPSPGSSSPQLQVKSSCKENPFNRKPSPAASPATKKATKGSKPVRPPAPGHGFPLIKRKVQADQYIPEEDIHGEMDTIERRLDALEHRGVLLEEKLRGGLNEGREDDMLVDWFKLIHEKHLLVRRESELIYVFKQQNLEQRQADVEYELRCLLNKPEKDWTEEDRAREKVLMQELVTLIEQRNAIINCLDEDRQREEEEDKMLEAMIKKKEFQREAEPEGKKKGKFKTMKMLKLLGNKRDAKSKSPRDKS

SEQ ID NO: 168 - protein, 201 aa, Homo sapiens
MTEKAPEPHVEEDDDDELDSKLNYKPPPQKSLKELQEMDKDDESLIKYKKTLLGDGPVVTDPKAPNVVVTRLTLVCESAPGPITMDLTGDLEALKKETIVLKEGSEYRVKIHFKVNRDIVSGLKYVQHTYRTGVKVDKATFMVGSYGPRPEEYEFLTPVEEAPKGMLARGTYHNKSFFTDDDKQDHLSWEWNLSIKKEWTE

SEQ ID NO: 169 - protein, 4390 aa, Homo sapiens
GWRAPGALLLALLLHGRLLAVTHGLRAYDGLSLPEDIETVTASQMRWTHSYLSDDEDMLADSISGDDLGSGDLGSGDFQMVYFRALVNFTRSIEYSPQLEDAGSREFREVSEAVVDTLESEYLKIPGDQVVSVVFIKELDGWVFVELDVGSEGNADGAQIQEMLLRVISSGSVASYVTSPQGFQFRRLGTVPQFPRACTEAEFACHSYNECVALEYRCDRRPDCRDMSDELNCEEPVLGISPTFSLLVETTSLPPRPETTIMRQPPVTHAPQPLLPGSVRPLPCGPQEAACRNGHCIPRDYLCDGQEDCEDGSDELDCGPPPPCEPNEFPCGNGHCALKLWRCDGDFDCEDRTDEANCPTKRPEEVCGPTQFRCVSTNMCIPASFHCDEESDCPDRSDEFGCMPPQVVTPPRESIQASRGQTVTFTCVAIGVPTPIINWRLNWGHIPSHPRVTVTSEGGRGTLIIRDVKESDQGAYTCEAMNARGMVFGIPDGVLELVPQRGPCPDGHFYLEHSAACLPCFCFGITSVCQSTRRFRDQIRLRFDQPDDFKGVNVTMPAQPGTPPLSSTQLQIDPSLHEFQLVDLSRRFLVHDSFWALPEQFLGNKVDSYGGSLRYNVRYELARGMLEPVQRPDVVLVGAGYRLLSRGHTPTQPGALNQRQVQFSEEHWVHESGRPVQRAELLQVLQSLEAVLIQTVYNTKMASVGLSDIAMDTTVTHATSHGRAHSVEECRCPIGYSGLSCESCDAHFTRVPGGPYLGTCSGCSCNGHASSCDPVYGHCLNCQHNTEGPQCNKCKAGFFGDAMKATATSCRPCPCPYIDASRRFSDTCFLDTDGQATCDACAPGYTGRRCESCAPGYEGNPIQPGGKCRPVNQEIVRCDERGSMGTSGEACRCKNNVVGRLCNECADGSFHLSTRNPDGCLKCFCMGVSRHCTSSSWSRAQLHGASEEPGHFSLTNAASTHTTNEGIFSPTPGELGFSSFHRLLSGPYFWSLPSRFLGDKVTSYGGELRFTVTQRSQPGSTPLHGQPLVVLQGNNIILEHHVAQEPSPGQPSTFIVPFREQAWQRPDGQPATREHLLMALAGIDTLLIRASYAQQPAESRVSGISMDVAVPEETGQDPALEVEQCSCPPGYRGPSCQDCDTGYTRTPSGLYLGTCERCSCHGHSEACEPETGACQGCQHHTEGPRCEQCQPGYYGDAQRGTPQDCQLCPCYGDPAAGQAAHTCFLDTDGHPTCDACSPGHSGRHCERCAPGYYGNPSQGQPCQRDSQVPGPIGCNCDPQGSVSSQCDAAGQCQCKAQVEGLTCSHCRPHHFHLSASNPDGCLPCFCMGITQQCASSAYTRHLISTHFAPGDFQGFALVNPQRNSRLTGEFTVEPVPEGAQLSFGNFAQLGHESFYWQLPETYQGDKVAAYGGKLRYTLSYTAGPQGSPLSDPDVQITGNNIMLVASQPALQGPERRSYEIMFREEFWRRPDGQPATREHLLMALADLDELLIRATFSSVPLVASISAVSLEVAQPGPSNRPRALEVEECRCPPGYIGLSCQDCAPGYTRTGSGLYLGHCELCECNGHSDLCHPETGACSQCQHNAAGEFCELCAPGYYGDATAGTPEDCQPCACPLTNPENMFSRTCESLGAGGYRCTACEPGYTGQYCEQCGPGYVGNPSVQGGQCLPETNQAPLVVEVHPARSIVPQGGSHSLRCQVSGSPPHYFYWSREDGRPVPSGTQQRHQGSELHFPSVQPSDAGVYICTCRNLHQSNTSRAELLVTEAPSKPITVTVEEQRSQSVRPGADVTFICTAKSKSPAYTLVWTRLHNGKLPTRAMDFNGILTIRNVQLSDAGTYVCTGSNMFAMDQGTATLHVQASGTLSAPVVSIHPPQLTVQPGQLAEFRCSATGSPTPTLEWTGGPGGQLPAKAQIHGGILRLPAVEPTDQAQYLCRAHSSAGQQVARAVLHVHGGGGPRVQVSPERTQVHAGRTVRLYCRAAGVPSATITWRKEGGSLPPQARSERTDIATLLIPAITTADAGFYLCVATSPAGTAQARIQVVVLSASDASPPPVKIESSSPSVTEGQTLDLNCVVAGSAHAQVTWYRRGGSLPPHTQVHGSRLRLPQVSPADSGEYVCRVENGSGPKEASITVSVLHGTHSGPSYTPVPGSTRPIRIEPSSSHVAEGQTLDLNCVVPGQAHAQVTWHKRGGSLPARHQTHGSLLRLHQVTPADSGEYVCHVVGTSGPLEASVLVTIEASVIPGPIPPVRIESSSSTVAEGQTLDLSCVVAGQAHAQVTWYKRGGSLPARHQVRGSRLYIFQASPADAGQYVCRASNGMEASITVTVTGTQGANLAYPAGSTQPIRIEPSSSQVAEGQTLDLNCVVPGQSHAQVTWHKRGGSLPVRHQTHGSLLRLYQASPADSGEYVCRVLGSSVPLEASVLVTIEPAGSVPALGVTPTVRIESSSSQVAEGQTLDLNCLVAGQAHAQVTWHKRGGSLPARHQVHGSRLRLLQVTPADSGEYVCRVVGSSGTQEASVLVTIQQRLSGSHSQGVAYPVRIESSSASLANGHTLDLNCLVASQAPHTITWYKRGGSLPSRHQIVGSRLRIPQVTPADSGEYVCHVSNGAGSRETSLIVTIQGSGSSHVPSVSPPIRIESSSPTVVEGQTLDLNCVVARQPQAIITWYKRGGSLPSRHQTHGSHLRLHQMSVADSGEYVCRANNNIDALEASIVISVSPSAGSPSAPGSSMPIRIESSSSHVAEGETLDLNCVVPGQAHAQVTWHKRGGSLPSHHQTRGSRLRLHHVSPADSGEYVCRVMGSSGPLEASVLVTIEASGSSAVHVPAPGGAPPIRIEPSSSRVAEGQTLDLKCVVPGQAHAQVTWHKRGGNLPARHQVHGPLLRLNQVSPADSGEYSCQVTGSSGTLEASVLVTIEPSSPGPIPAPGLAQPIYIEASSSHVTEGQTLDLNCVVPGQAHAQVTWYKRGGSLPARHQTHGSQLRLHLVSPADSGEYVCRAASGPGPEQEASFTVTVPPSEGSSYRLRSPVISIDPPSSTVQQGQDASFKCLIHDGAAPISLEWKTRNQELEDNVHISPNGSIITIVGTRPSNHGTYRCVASNAYGVAQSVVNLSVHGPPTVSVLPEGPVWVKVGKAVTLECVSAGEPRSSARWTRISSTPAKLEQRTYGLMDSHAVLQISSAKPSDAGTYVCLAQNALGTAQKQVEVIVDTGAMAPGAPQVQAEEAELTVEAGHTATLRCSATGSPAPTIHWSKLRSPLPWQHRLEGDTLIIPRVAQQDSGQYICNATSPAGHAEATIILHVESPPYATTVPEHASVQAGETVQLQCLAHGTPPLTFQWSRVGSSLPGRATARNELLHFERAAPEDSGRYRCRVTNKVGSAEAFAQLLVQGPPGSLPATSIPAGSTPTVQVTPQLETKSIGASVEFHCAVPSDRGTQLRWFKEGGQLPPGHSVQDGVLRIQNLDQSCQGTYICQAHGPWGKAQASAQLVIQALPSVLINIRTSVQTVVVGHAVEFECLALGDPKPQVTWSKVGGHLRPGIVQSGGVVRIAHVELADAGQYRCTATNAAGTTQSHVLLLVQALPQISMPQEVRVPAGSAAVFPCIASGYPTPDISWSKLDGSLPPDSRLENNMLMLPSVRPQDAGTYVCTATNRQGKVKAFAHLQVPERVVPYFTQTPYSFLPLPTIKDAYRKFEIKITFRPDSADGMLLYNGQKRVPGSPTNLANRQPDFISFGLVGGRPEFRFDAGSGMATIRHPTPLALGHFHTVTLLRSLTQGSLIVGDLAPVNGTSQGKFQGLDLNEELYLGGYPDYGAIPKAGLSSGFIGCVRELRIQGEEIVFHDLNLTAHGISHCPTCRDRPCQNGGQCHDSESSSYVCVCPAGFTGSRCEHSQALHCHPEACGPDATCVNRPDGRGYTCRCHLGRSGLRCEEGVTVTTPSLSGAGSYLALPALTNTHHELRLDVEFKPLAPDGVLLFSGGKSGPVEDFVSLAMVGGHLEFRYELGSGLAVLRSAEPLALGRWHRVSAERLNKDGSLRVNGGRPVLRSSPGKSQGLNLHTLLYLGGVEPSVPLSPATNMSAHFRGCVGEVSVNGKRLDLTYSFLGSQGIGQCYDSSPCERQPCQHGATCMPAGEYEFQCLCRDGFKGDLCEHEENPCQLREPCLHGGTCQGTRCLCLPGFSGPRCQQGSGHGIAESDWHLEGSGGNDAPGQYGAYFHDDGFLAFPGHVFSRSLPEVPETIELEVRTSTASGLLLWQGVEVGEAGQGKDFISLGLQDGHLVFRYQLGSGEARLVSEDPINDGEWHRVTALREGRRGSIQVDGEELVSGRSPGPNVAVNAKGSVYIGGAPDVATLTGGRFSSGITGCVKNLVLHSARPGAPPPQPLDLQHRAQAGANTRPCPS

SEQ ID NO: 170 - protein, 271 aa, Homo sapiens
MFRDFGEPGPSSGNGGGYGGPAQPPAAAQAAQQKFHLVPSINTMSGSQELQWMVQPHFLGPSSYPRPLTYPQYSPPQPRPGVIRALGPPPGVRRRPCEQISPEEEERRRVRRERNKLAAAKCRNRRKELTDFLQAETDKLEDEKSGLQREIEELQKQKERLELVLEAHRPICKIPEGAKEGDTGSTSGTSSPPAPCRPVPCISLSPGPVLEPEALHTPTLMTTPSLTPFTPSLVFTYPSTPEPCASAHRKSSSSSGDPSSDPLGSPTLLAL

SEQ ID NO: 171 - protein, 378 aa, Homo sapiens
MPAPEMPKTRELSPTEPQDRVPPSGLHVPAAPTKALPCLPPWEGVLDMFSIKRFRARAQLVSGHSCRLVQALPTVIRSAGCIPSNIVWDLLASICPAKAKDVCVVRLCPHGARDTQNCRLLYSYLNDRQRHGLASVEHMGMVLLPLPAFQPLPTRLRPLGGPGLEVTHSSLLLAVLLPKEGLPDTAGSSPWLGKVQKMVSFNSKVEKRYYQPDDRRPNVPLKGTPPPGGAWQQSQGRGSIAPRGISAWQRPPRGRGRLWPEPENWQHPGRGQWPPEPGLRQSQHPYSVAPAGHGFGRGQHFHRDSCPHQALLRHLESLATMSHQLQALLCPQTKSSIPRPLQRLSSALAAPEPPGPARDSSLGPTDEAGSECPFPRKA

SEQ ID NO: 172 - protein, 474 aa, Homo sapiens
MSGPTWLPPKQPEPARAPQGRAIPRGTPGPPPAHGAALHPRVNFCPLPSEQCYQAPGGPEDRGPAWVGSHGVLQHTQGLPADRGGLRPGSLDAEIDLLSSTLAELNGGRGHASRRPDRQAYEPPPPPAYRTGSLKPNPASPLPASPYGGPTPASYTTASTPAGPAFPVQVKVAQPVRGCGPPRRGASQASGPLPGPHFPLPGRGEVWGPGYRSQREPGPGAKEEAAGISGPAGRGRGGEHGPQVPLSQPPEDELDRLTKKLVHDMNHPPSGEYFGQCGGCGEDVVGDGAGVVALDRVFHVGCFVCSTCRAQLRGQHFYAVERRAYCEGCYVATLEKCATCSQPILDRILRAMGKAYHPGCFTCVVCHRGLDGIPFTVDATSQIHCIEDFHRKFAPRCSVCGGAIMPEPGQEETVRIVALDRSFHIGCYKCEECGLLLSSEGECQGCYPLDGHILCKACSAWRIQELSATVTTDC

SEQ ID NO: 173 - protein, 465 aa, Homo sapiens
MASTTSTKKMMEEATCSICLSLMTNPVSINCGHSYCHLCITDFFKNPSQKQLRQETFCCPQCRAPFHMDSLRPNKQLGSLIEALKETDQEMSCEEHGEQFHLFCEDEGQLICWRCERAPQHKGHTTALVEDVCQGYKEKLQKAVTKLKQLEDRCTEQKLSTAMRITKWKEKVQIQRQKIRSDFKNLQCFLHEEEKSYLWRLEKEEQQTLSRLRDYEAGLGLKSNELKSHILELEEKCQGSAQKLLQNVNDTLSRSWAVKLETSEAVSLELHTMCNVSKLYFDVKKMLRSHQVSVTLDPDTAHHELILSEDRRQVTRGYTQENQDTSSRRFTAFPCVLGCEGFTSGRRYFEVDVGEGTGWDLGVCMENVQRGTGMKQEPQSGFWTLRLCKKKGYVALTSPPTSLHLHEQPLLVGIFLDYEAGVVSFYNGNTGCHIFTFPKASFSDTLRPYFQVYQYSPLFLPPPGD

SEQ ID NO: 174 - protein, 1366 aa, Homo sapiens
MLAVGPAMDRDYPQHEPPPAGSLLYSPPPLQSAMLHCPYWNTFSLPPYPAFSSDSRPFMSSASFLGSQPCPDTSYAPVATASSLPPKTCDFAQDSSYFEDFSNISIFSSSVDSLSDIVDTPDFLPADSLNQVSTIWDDNPAPSTHDKLFQLSRPFAGFEDFLPSHSTPLLVSYQEQSVQSQPEEEDEAEEEEAEELGHTETYADYVPSKSKIGKQHPDRVVETSTLSSVPPPDITYTLALPSDSGALSALQLEAITYACQQHEVLLPSGQRAGFLIGDGAGVGKGRTVAGVILENHLRGRKKALWFSVSNDLKYDAERDLRDIEATGIAVHALSKIKYGDTTTSEGVLFATYSALIGESQAGGQHRTRLRQILDWCGEAFEGVIVFDECHKAKNAGSTKMGKAVLDLQNKLPLARVVYASATGASEPRNMIYMSRLGIWGEGTPFRNFEEFLHAIEKRGVGAMEIVAMDMKVSGMYIARQLSFSGVTFRIEEIPLAPAFECVYNRAALLWAEALNVFQQAADWIGLESRKSLWGQFWSAHQRFFKYLCIAAKVRRLVELAREELARDKCVVIGLQSTGEARTREVLGENDGHLNCFVSAAEGVFLSLIQKHFPSTKRKRDRGAGSKRKRRPRGRGAKAPRLACETAGVIRISDDSSTESDPGLDSDFNSSPESLVDDDVVIVDAVGLPSDDRGSLCLLQRDPHGPGVLERVERLKQDLLDKVRRLGRELPVNTLDELIDQLGGPQRVAEMTGRKGRVVSRPDGTVAFESRAEQGLSIDHVNLREKQRFMSGEKLVAIISEASSSGVSLQADRRVQNQRRRVHMTLELPWSADRAIQQFGRTHRSNQVSAPEYVFLISELAGERRFASIVAKRLESLGALTHGDRRATESRDLSKYNFENKYGTRALHCVLTTILSQTENKVPVPQGYPGGVPTFFRDMKQGLLSVGIGGRESRNGCLDVEKDCSITKFLNRILGLEVHKQNALFQYFSDTFDHLIEMDKREGKYDMGILDLAPGIEEIYEESQQVFLAPGHPQDGQVVFYKISVDRGLKWEDAFAKSLALTGPYDGFYLSYKVRGNKPSCLLAEQNRGQFFTVYKPNIGRQSQLEALDSLRRKFHRVTAEEAKEPWESGYALSLTHCSHSAWNRHCRLAQEGKDCLQGLRLRHHYMLCGALLRVWGRIAAVMADVSSSSYLQIVRLKTKDRKKQVGIKIPEGCVRRVLQELRLMDADVKRRQAPALGCPAPPAPRPLALPCGPGEVLDLTYSPPAEAFPPPPHFSFPAPLSLDAGPGVVPLGTPDAQADPAALAHQGCDINFKEVLEDMLRSLHAGPPSEGALGEGAGAGGAAGGGPERQSVIQFSPPFPGAQAPL

SEQ ID NO: 175 - protein, 376 aa, Homo sapiens
MGLLAFLKTQFVLHLLVGFVFVVSGLVINFVQLCTLALWPVSKQLYRRLNCRLAYSLWSQLVMLLEWWSCTECTLFTDQATVERFGKEHAVIILNHNFEIDFLCGWTMCERFGVLGSSKVLAKKELLYVPLIGWTWYFLEIVFCKRKWEEDRDTVVEGLRRLSDYPEYMWFLLYCEGTRFTETKHRVSMEVAAAKGLPVLKYHLLPRTKGFTTAVKCLRGTVAAVYDVTLNFRGNKNPSLLGILYGKKYEADMCVRRFPLEDIPLDEKEAAQWLHKLYQEKDALQEIYNQKGMFPGEQFKPARRPWTLLNFLSWATILLSPLFSFVLGVFASGSPLLILTFLGFVGAASFGVRRLIGVTEIEKGSSYGNQEFKKKE

SEQ ID NO: 176 - protein, 488 aa, Homo sapiens
MQQTRTEAVAGAFSRCLGFCGMRLGLLLLARHWCIAGVFPQKFDGDSAYVGMSDGNPELLSTSQTYNGQSENNEDYEIPPITPPNLPEPSLLHLGDHEASYHSLCHGLTPNGLLPAYSYQAMDLPAIMVSNMLAQDSHLLSGQLPTIQEMVHSEVAAYDSGRPGPLLGRPAMLASHMSALSQSQLISQMGIRSSIAHSSPSPPGSKSATPSPSSSTQEEESEVHFKISGEKRPSADPGKKAKNPKKKKKKDPNEPQKPVSAYALFFRDTQAAIKGQNPSATFGDVSKIVASMWDSLGEEQKQSSPDQGETKSTQANPPAKMLPPKQPMYAMPGLASFLTPSDLQAFRSGASPASLARTLGSKSLLPGLSASPPPPPSFPLSPTLHQQLSLPPHAQGALLSPPVSMSPAPQPPVLPTPMALQVQLAMSPSPPGPQDFPHISEFPSSSGSCSPGPSNPTSSGDWDSSYPSGECGISTCSLLPRDKSLYLT

SEQ ID NO: 177 - protein, 960 aa, Homo sapiens
MFHSSAMVNSHRKPMFNIHRGFYCLTAILPQICICSQFSVPSSYHFTEDPGAFPVATNGERFPWQELRLPSVVIPLHYDLFVHPNLTSLDFVASEKIEVLVSNATQFIILHSKDLEITNATLQSEEDSRYMKPGKELKVLSYPAHEQIALLVPEKLTPHLKYYVAMDFQAKLGDGFEGFYKSTYRTLGGETRILAVTDFEPTQARMAFPCFDEPLFKANFSIKIRRESRHIALSNMPKVKTIELEGGLLEDHFETTVKMSTYLVAYIVCDFHSLSGFTSSGVKVSIYASPDKRNQTHYALQASLKLLDFYEKYFDIYYPLSKLDLIAIPDFAPGAMENWGLITYRETSLLFDPKTSSASDKLWVTRVIAHELAHQWFGNLVTMEWWNDIWLKEGFAKYMELIAVNATYPELQFDDYFLNVCFEVITKDSLNSSRPISKPAETPTQIQEMFDEVSYNKGACILNMLKDFLGEEKFQKGIIQYLKKFSYRNAKNDDLWSSLSNSCLESDFTSGGVCHSDPKMTSNMLAFLGENAEVKEMMTTWTLQKGIPLLVVKQDGCSLRLQQERFLQGVFQEDPEWRALQERYLWHIPLTYSTSSSNVIHRHILKSKTDTLDLPEKTSWVKFNVDSNGYYIVHYEGHGWDQLITQLNQNHTLLRPKDRVGLIHDVFQLVGAGRLTLDKALDMTYYLQHETSSPALLEGLSYLESFYHMMDRRNISDISENLKRYLLQYFKPVIDRQSWSDKGSVWDRMLRSALLKLACDLNHAPCIQKAAELFSQWMESSGKLNIPTDVLKIVYSVGAQTTAGWNYLLEQYELSMSSAEQNKILYALSTSKHQEKLLKLIELGMEGKVIKTQNLAALLHAIARRPKGQQLAWDFVRENWTHLLKKFDLGSYDIRMIISGTTAHFSSKDKLQEVKLFFESLEAQGSHLDIFQTVLETITKNIKWLEKNLPTLRTWLMVNT

SEQ ID NO: 178 - protein, 512 aa, Homo sapiens
MATANGAVENGQPDGKPPALPRPIRNLEVKFTKIFINNEWHESKSGKKFATCNPSTREQICEVEEGDKPDVDKAVEAAQVAFQRGSPWRRLDALSRGRLLHQLADLVERDRATLAALETMDTGKPFLHAFFIDLEGCIRTLRYFAGWADKIQGKTIPTDDNVVCFTRHEPIGVCGAITPWNFPLLMLVWKLAPALCCGNTMVLKPAEQTPLTALYLGSLIKEAGFPPGVVNIVPGFGPTVGAAISSHPQINKIAFTGSTEVGKLVKEAASRSNLKRVTLELGGKNPCIVCADADLDLAVECAHQGVFFNQGQCCTAASRVFVEEQVYSEFVRRSVEYAKKRPVGDPFDVKTEQGPQIDQKQFDKILELIESGKKEGAKLECGGSAMEDKGLFIKPTVFSEVTDNMRIAKEEIFGPVQPILKFKSIEEVIKRANSTDYGLTAAVFTKNLDKALKLASALESGTVWINCYNALYAQAPFGGFKMSGNGRELGEYALAEYTEVKTVTIKLGDKNP

SEQ ID NO: 179 - protein, 2061 aa, Homo sapiens
MLRVIVESASNIPKTKFGKPDPIVSVIFKDEKKKTKKVDNELNPVWNEILEFDLRGIPLDFSSSLGIIVKDFETIGQNKLIGTATVALKDLTGDQSRSLPYKLISLLNEKGQDTGATIDLVIGYDPPSAPHPNDLSGPSVPGMGGDGEEDEGDEDRLDNAVRGPGPKGPVGTVSEAQLARRLTKVKNSRRMLSNKPQDFQIRVRVIEGRQLSGNNIRPVVKVHVCGQTHRTRIKRGNNPFFDELFFYNVNMTPSELMDEIISIRVYNSHSLRADCLMGEFKIDVGFVYDEPGHAVMRKWLLLNDPEDTSSGSKGYMKVSMFVLGTGDEPPPERRDRDNDSDDVESNLLLPAGIALRWVTFLLKIYRAEDIPQMDDAFSQTVKEIFGGNADKKNLVDPFVEVSFAGKKVCTNIIEKNANPEWNQVVNLQIKFPSVCEKIKLTIYDWDRLTKNDVVGTTYLHLSKIAASGGEVEDFSSSGTGAASYTVNTGETEVGFVPTFGPCYLNLYGSPREYTGFPDPYDELNTGKGEGVAYRGRILVELATFLEKTPPDKKLEPISNDDLLVVEKYQRRRKYSLSAVFHSATMLQDVGEAIQFEVSIGNYGNKFDTTCKPLASTTQYSRAVFDGNYYYYLPWAHTKPVVTLTSYWEDISHRLDAVNTLLAMAERLQTNIEALKSGIQGKIPANQLAELWLKLIDEVIEDTRYTLPLTEGKANVTVLDTQIRKLRSRSLSQIHEAAVRMRSEATDVKSTLAEIEDWLDKLMQLTEEPQNSMPDIIIWMIRGEKRLAYARIPAHQVLYSTSGENASGKYCGKTQTIFLKYPQEKNNGPKVPVELRVNIWLGLSAVEKKFNSFAEGTFTVFAEMYENQALMFGKWGTSGLVGRHKFSDVTGKIKLKREFFLPPKGWEWEGEWIVDPERSLLTEADAGHTEFTDEVYQNESRYPGGDWKPAEDTYTDANGDKAASPSELTCPPGWEWEDDAWSYDINRAVDEKGWEYGITIPPDHKPKSWVAAEKMYHTHRRRRLVRKRKKDLTQTASSTARAMEELQDQEGWEYASLIGWKFHWKQRSSDTFRRRRWRRKMAPSETHGAAAIFKLEGALGADTTEDGDEKSLEKQKHSATTVFGANTPIVSCNFDRVYIYHLRCYVYQARNLLALDKDSFSDPYAHICFLHRSKTTEIIHSTLNPTWDQTIIFDEVEIYGEPQTVLQNPPKVIMELFDNDQVGKDEFLGRSIFSPVVKLNSEMDITPKLLWHPVMNGDKACGDVLVTAELILRGKDGSNLPILPPQRAPNLYMVPQGIRPVVQLTAIEILAWGLRNMKNFQMASITSPSLVVECGGERVESVVIKNLKKTPNFPSSVLFMKVFLPKEELYMPPLVIKVIDHRQFGRKPVVGQCTIERLDRFRCDPYAGKEDIVPQLKASLLSAPPCRDIVIEMEDTKPLLASKLTEKEEEIVDWWSKFYASSGEHEKCGQYIQKGYSKLKIYNCELENVAEFEGLTDFSDTFKLYRGKSDENEDPSVVGEFKGSFRIYPLPDDPSVPAPPRQFRELPDSVPQECTVRIYIVRGLELQPQDNNGLCDPYIKITLGKKVIEDRDHYIPNTLNPVFGRMYELSCYLPQEKDLKISVYDYDTFTRDEKVGETIIDLENRFLSRFGSHCGIPEEYCVSGVNTWRDQLRPTQLLQNVARFKGFPQPILSEDGSRIRYGGRDYSLDEFEANKILHQHLGAPEERLALHILRTQGLVPEHVETRTLHSTFQPNISQGKLQMWVDVFPKSLGPPGPPFNITPRKAKKYYLRVIIWNTKDVILDEKSITGEEMSDIYVKGWIPGNEENKQKTDVHYRSLDGEGNFNWRFVFPFDYLPAEQLCIVAKKEHFWSIDQTEFRIPPRLIIQIWDNDKFSLDDYLGFLELDLRHTIIPAKSPEKCRLDMIPDLKAMNPLKAKTASLFEQKSMKGWWPCYAEKDGARVMAGKVEMTLEILNEKEADERPAGKGRDEPNMNPKLDLPNRPETSFLWFTNPCKTMKFIVWRRFKWVIIGLLFLLILLLFVAVLLYSLPNYLSMKIVKPNV

SEQ ID NO: 180 - protein, 1028 aa, Homo sapiens
MRAARALLPLLLQACWTAAQDEPETPRAVAFQDCPVDLFFVLDTSESVALRLKPYGALVDKVKSFTKRFIDNLRDRYYRCDRNLVWNAGALHYSDEVEIIQGLTRMPGGRDALKSSVDAVKYFGKGTYTDCAIKKGLEQLLVGGSHLKENKYLIVVTDGHPLEGYKEPCGGLEDAVNEAKHLGVKVFSVAITPDHLEPRLSIIATDHTYRRNFTAADWGQSRDAEEAISQTIDTIVDMIKNNVEQVCCSFECQPARGPPGLRGDPGFEGERGKPGLPGEKGEAGDPGRPGDLGPVGYQGMKGEKGSRGEKGSRGPKGYKGEKGKRGIDGVDGVKGEMGYPGLPGCKGSPGFDGIQGPPGPKGDPGAFGLKGEKGEPGADGEAGRPGARGPSGDEGPAGEPGPPGEKGEAGDEGNPGPDGAPGERGGPGERGPRGTPGPRGPRGDPGEAGPQGDQGREGPVGVPGDPGEAGPIGPKGYRGDEGPPGSEGARGAPGPAGPPGDPGLMGERGEDGPAGNGTEGFPGFPGYPGNRGAPGINGTKGYPGLKGDEGEAGDPGDDNNDIAPRGVKGAKGYRGPEGPQGPPGHQGPPGPDECEILDIIMKMCSCCECKCGPIDLLFVLDSSESIGLQNFEIAKDFVVKVIDRLSRDELVKFEPGQSYAGVVQYSHSQMQEHVSLRSPSIRNVQELKEAIKSLQWMAGGTFTGEALQYTRDQLLPPSPNNRIALVITDGRSDTQRDTTPLNVLCSPGIQVVSVGIKDVFDFIPGSDQLNVISCQGLAPSQGRPGLSLVKENYAELLEDAFLKNVTAQICIDKKCPDYTCPITFSSPADITILLDGSASVGSHNFDTTKRFAKRLAERFLTAGRTDPAHDVRVAVVQYSGTGQQRPERASLQFLQNYTALASAVDAMDFINDATDVNDALGYVTRFYREASSGAAKKRLLLFSDGNSQGATPAAIEKAVQEAQRAGIEIFVVVVGRQVNEPHIRVLVTGKTAEYDVPYGESHLFRVPSYQALLRGVFHQTVSRKVALG

SEQ ID NO: 181 - protein, 1445 aa, Homo sapiens
MRRLLEPCWWILFLKITSSVLHYVVCFPALTEGYVGALHENRHGSAVQIRRRKASGDPYWAYSGAYGPEHWVTSSVSCGSRHQSPIDILDQYARVGEEYQELQLDGFDNESSNKTWMKNTGKTVAILLKDDYFVSGAGLPGRFKAEKVEFHWGHSNGSAGSEHSINGRRFPVEMQIFFYNPDDFDSFQTAISENRIIGAMAIFFQVSPRDNSALDPIIHGLKGVVHHEKETFLDPFVLRDLLPASLGSYYRYTGSLTTPPCSEIVEWIVFRRPVPISYHQLEAFYSIFTTEQQDHVKSVEYLRNNFRPQQRLHDRVVSKSAVRDSWNHDMTDFLENPLGTEASKVCSSPPIHMKVQPLNQTALQVSWSQPETIYHPPIMNYMISYSWTKNEDEKEKTFTKDSDKDLKATISHVSPDSLYLFRVQAVCRNDMRSDFSQTMLFQANTTRIFQGTRIVKTGVPTASPASSADMAPISSGSSTWTSSGIPFSFVSMATGMGPSSSGSQATVASVVTSTLLAGLGFGGGGISSFPSTVWPTRLPTAASASKQAARPVLATTEALASPGPDGDSSPTKDGEGTEEGEKDEKSESEDGEREHEEDGEKDSEKKEKSGVTHAAEERNQTEPSPTPSSPNRTAEGGHQTIPGHEQDHTAVPTDQTGGRRDAGPGLDPDMVTSTQVPPTATEEQYAGSDPKRPEMPSKKPMSRGDRFSEDSRFITVNPAEKNTSGMISRPAPGRMEWIIPLIVVSALTFVCLILLIAVLVYWRGCNKIKSKGFPRRFREVPSSGERGEKGSRKCFQTAHFYVEDSSSPRVVPNESIPIIPIPDDMEAIPVKQFVKHIGELYSNNQHGFSEDFEEVQRCTADMNITAEHSNHPENKHKNRYINILAYDHSRVKLRPLPGKDSKHSDYINANYVDGYNKAKAYIATQGPLKSTFEDFWRMIWEQNTGIIVMITNLVEKGRRKCDQYWPTENSEEYGNIIVTLKSTKIHACYTVRRFSIRNTKVKKGQKGNPKGRQNERVVIQYHYTQWPDMGVPEYALPVLTFVRRSSAARMPETGPVLVHCSAGVGRTGTYIVIDSMLQQIKDKSTVNVLGFLKHIRTQRNYLVQTEEQYIFIHDALLEAILGKETEVSSNQLHSYVNSILIPGVGGKTRLEKQFKLVTQCNAKYVECFSAQKECNKEKNRNSSVVPSERARVGLAPLPGMKGTDYINASYIMGYYRSNEFIITQHPLPHTTKDFWRMIWDHNAQIIVMLPDNQSLAEDEFVYWPSREESMNCEAFTVTLISKDRLCLSNEEQIIIHDFILEATQDDYVLEVRHFQCPKWPNPDAPISSTFELINVIKEEALTRDGPTIVHDEYGAVSAGMLCALTTLSQQLENENAVDVFQVAKMINLMRPGVFTDIEQYQFIYKARLSLVSTKENGNGPMTVDKNGAVLIADESDPAESMESLV

SEQ ID NO: 182 - protein, 160 aa, Homo sapiens
MLPFLFFSTLFSSIFTEAQKQYWVCNSSDASISYTYCDKMQYPISINVNPCIELKGSKGLLHIFYIPRRDLKQLYFNLYITVNTMNLPKRKEVICRGSDDDYSFCRALKGETVNTTISFSFKGIKFSKGKYKCVVEAISGSPEEMLFCLEFVILHQPNSN

SEQ ID NO: 183 - protein, 406 aa, Homo sapiens
MSGAPTAGAALMLCAATAVLLSAQGGPVQSKSPRFASWDEMNVLAHGLLQLGQGLREHAERTRSQLSALERRLSACGSACQGTEGSTDLPLAPESRVDPEVLHSLQTQLKAQNSRIQQLFHKVAQQQRHLEKQHLRIQHLQSQFGLLDHKHLDHEVAKPARRKRLPEMAQPVDPAHNVSRLHRLPRDCQELFQVGERQSGLFEIQPQGSPPFLVNCKMTSDGGWTVIQRRHDGSVDFNRPWEAYKAGFGDPHGEFWLGLEKVHSITGDRNSRLAVQLRDWDGNAELLQFSVHLGGEDTAYSLQLTAPVAGQLGATTVPPSGLSVPFSTWDQDHDLRRDKNCAKSLSGGWWFGTCSHSNLNGQYFRSIPQQRQKLKKGIFWKTWRGRYYPLQATTMLIQPMAAEAAS

SEQ ID NO: 184 - protein, 742 aa, Homo sapiens [sequence omitted]

SEQ ID NO: 185 - protein, 403 aa, Homo sapiens
MFVASERKMRAHQVLTFLLLFVITSVASENASTSRGCGLDLLPQYVSLCDLDAIWGIVVEAVAGAGALITLLLMLILLVRLPFIKEKEKKSPVGLHFLFLLGTLGLFGLTFAFIIQEDETICSVRRFLWGVLFALCFSCLLSQAWRVRRLVRHGTGPAGWQLVGLALCLMLVQVIIAVEWLVLTVLRDTRPACAYEPMDFVMALIYDMVLLVVTLGLALFTLCGKFKRWKLNGAFLLITAFLSVLIWVAWMTMYLFGNVKLQQGDAWNDPTLAITLAASGWVFVIFHAIPEIHCTLLPALQENTPNYFDTSQPRMRETAFEEDVQLPRAYMENKAFSMDEHNAALRTAGFPNGSLGKRPSGSLGKRPSAPFRSNVYQPTEMAVVLNGGTIPTAPPSHTGRHLW

SEQ ID NO: 186 - protein, 654 aa, Homo sapiens
SAPLSVSQTTLPQSSSTPVLPRARETPVTSFQTSTMTSFMTMLHSSQTADLKSQSTPHQEKVITESKSPSLVSLPTESTKAVTTNSPLPPSLTESSTEQTLPATSTNLAQMSPTFTTTILKTSQPLMTTPGTLSSTASLVTGPIAVQTTAGKQLSLTHPEILVPQISTEGGISTERNRVIVDATTGLIPLTSVPTSAKEMTTKLGVTAEYSPASRSLGTSPSPQTTVVSTAEDLAPKSATFAVQSSTQSPTTLSSSASVNSCAVNPCLHNGECVADNTSRGYHCRCPPSWQGDDCSVDVNECLSNPCPSTATCNNTQGSFICKCPVGYQLEKGICNLVRTFVTEFKLKRTFLNTTVEKHSDLQEVENEITKTLNMCFSALPSYIRSTVHASRESNAVVISLQTTFSLASNVTLFDLADRMQKCVNSCKSSAEVCQLLGSQRRIFRAGSLCKRKSPECDKDTSICTDLDGVALCQCKSGYFQFNKMDHSCRACEDGYRLENETCMSCPFGLGGLNCGNPYQLITVVIAAAGGGLLLILGIALIVTCCRKNKNDISKLIFKSGDFQMSPYAEYPKNPRSQEWGREAIEMHENGSTKNLLQMTDVYYSPTSVRNPELERNGLYPAYTGLPGSRHSCIFPGQYNPSFISDESRRRDYF

SEQ ID NO: 187 - protein, 132 aa, Homo sapiens
MESHSLLWPEGGARGQSHLDVTLASARIQTTKNIWNWDVCFEAARKQVKGNQDNSLSLRWQGSKIPCAGKPEPRGATAQLKMTGHQPCTIRNQHLSSPLRRAPGVSLYPSQTSGLQQMWLHAIRIILPCGLG

SEQ ID NO: 188 - protein, 374 aa, Homo sapiens
MARSLTWRCCPWCLTEDEKAAARVDQEINRILLEQKKQDRGELKLLLLGPGESGKSTFIKQMRIIHGAGYSEEERKGFRPLVYQNIFVSMRAMIEAMERLQIPFSRPESKHHASLVMSQDPYKVTTFEKRYAAAMQWLWRDAGIRACYERRREFHLLDSAVYYLSHLERITEEGYVPTAQDVLRSRMPTTGINEYCFSVQKTNLRIVDVGGQKSERKKWIHCFENVIALIYLASLSEYDQCLEENNQENRMKESLALFGTILELPWFKSTSVILFLNKTDILEEKIPTSHLATYFPSFQGPKQDAEAAKRFILDMYTRMYTGCVDGPEGSKKGARSRRLFSHYTCATDTQNIRKVFKDVRDSVLARYLDEINLL

SEQ ID NO: 189 - protein, 634 aa, Homo sapiens
MAMWNRPCQRLPQQPLVAEPTAEGEPHLPTGRELTEANRFAYAALCGISLSQLFPEPEHSSFCTEFMAGLVQWLELSEAVLPTMTAFASGLGGEGADVFVQILLKDPILKDDPTVITQDLLSFSLKDGHYDARARVLVCHMTSLLQVPLEELDVLEEMFLESLKEIKEEESEMAEASRKKKENRRKWKRYLLIGLATVGGGTVIGVTGGLAAPLVAAGAATIIGSAGAAALGSAAGIAIMTSLFGAAGAGLTGYKMKKRVGAIEEFTFLPLTEGRQLHITIAVTGWLASGKYRTFSAPWAALAHSREQYCLAWEAKYLMELGNALETILSGLANMVAQEALKYTVLSGIVAALTWPASLLSVANVIDNPWGVCLHRSAEVGKHLAHILLSRQQGRRPVTLIGFSLGARVIYFCLQEMAQEKDCQGIIEDVILLGAPVEGEAKHWEPFRKVVSGRIINGYCRGDWLLSFVYRTSSVQLHVAGLQPVLLQDRRVENVDLTSVVSGHLDYAKQMDAILKAVGIRTKPGWDEKGLLLAPGCLPSEEPRQAAAAASSGETPHQVGQTQGPISGDTSKLAMSTDPSQAQVPVGLDQSEGASLPAAASPERPPICSHGMDPNPLGCPDCACKTQGPSTGLD

SEQ ID NO: 190 - protein, 261 aa, Homo sapiens
MRESALEPGPVPEAPAGGPVHAVTVVTLLEKLASMLETLRERQGGLARRQGGLAGSVRRIQSGLGALSRSHDTTSNTLAQLLAKAERVSSHANAAQERAVRRAAQVQRLEANHGLLVARGKLHVLLFKEEGEVPASAFQKAPEPLGPADQSELGPEQLEAEVGESSDEEPVESRAQRLRRTGLQKVQSLRRALSGRKGPAAPPPTPVKPPRLGPGRSAEAQPEAQPALEPTLEPEPPQDTEEDPGRPGAAEEALLQMESVA

SEQ ID NO: 191 - protein, 967 aa, Homo sapiens [sequence omitted]

SEQ ID NO: 192 - protein, 879 aa, Homo sapiens
MAGGGGDLSTRRLNECISPVANEMNHLPAHSHDLQRMFTEDQGVDDRLLYDIVFKHFKRNKVEISNAIKKTFPFLEGLRDRDLITNKMFEDSQDSCRNLVPVQRVVYNVLSELEKTFNLPVLEALFSDVNMQEYPDLIHIYKGFENVIHDKLPLQESEEEEREERSGLQLSLEQGTGENSFRSLTWPPSGSPSHAGTTPPENGLSEHPCETEQINAKRKDTTSDKDDSLGSQQTNEQCAQKAEPTESCEQIAVQVNNGDAGREMPCPLPCDEESPEAELHNHGIQINSCSVRLVDIKKEKPFSNSKVECQAQARTHHNQASDIIVISSEDSEGSTDVDEPLEVFISAPRSEPVINNDNPLESNDEKEGQEATCSRPQIVPEPMDFRKLSTFRESFKKRVIGQDHDFSESSEEEAPAEASSGALRSKHGEKAPMTSRSTSTWRIPSRKRRFSSSDFSDLSNGEELQETCSSSLRRGSGSQPQEPENKKCSCVMCFPKGVPRSQEARTESSQASDMMDTMDVENNSTLEKHSGKRRKKRRHRSKVNGLQRGRKKDRPRKHLTLNNKVQKKRWQQRGRKANTRPLKRRRKRGPRIPKDENINFKQSELPVTCGEVKGTLYKERFKQGTSKKCIQSEDKKWFTPREFEIEGDRGASKNWKLSIRCGGYTLKVLMENKFLPEPPSTRKKRILESHNNTLVDPCEEHKKKNPDASVKFSEFLKKCSETWKTIFAKEKGKFEDMAKADKAHYEREMKTYIPPKGEKKKKFKDPNAPKRPPLAFFLFCSEYRPKIKGEHPGLSIDDVVKKLAGMWNNTAAADKQFYEKKAAKLKEKYKKDIAAYRAKGKPNSAKKRVVKAEKSKKKKEEEEDEEDEQEEENEEDDDK

SEQ ID NO: 193 - protein, 1822 aa, Homo sapiens [sequence omitted]

SEQ ID NO: 194 - protein, 685 aa, Homo sapiens
MELLRTITYQPAASTKMCEQALGKGCGADSKKKRPPQPPEESQPPQSQAQVPPAAPHHHHHHSHSGPEISRIIVDPTTGKRYCRGKVLGKGGFAKCYEMTDLTNNKVYAAKIIPHSRVAKPHQREKIDKEIELHRILHHKHVVQFYHYFEDKENIYILLEYCSRRSMAHILKARKVLTEPEVRYYLRQIVSGLKYLHEQEILHRDLKLGNFFINEAMELKVGDFGLAARLEPLEHRRRTICGTPNYLSPEVLNKQGHGCESDIWALGCVMYTMLLGRPPFETTNLKETYRCIREARYTMPSSLLAPAKHLIASMLSKNPEDRPSLDDIIRHDFFLQGFTPDRLSSSCCHTVPDFHLSSPAKNFFKKAAAALFGGKKDKARYIDTHNRVSKEDEDIYKLRHDLKKTSITQQPSKHRTDEELQPPTTTVARSGTPAVENKQQIGDAIRMIVRGTLGSCSSSSECLEDSTMGSVADTVARVLRGCLENMPEADCIPKEQLSTSFQWVTKWVDYSNKYGFGYQLSDHTVGVLFNNGAHMSLLPDKKTVHYYAELGQCSVFPATDAPEQFISQVTVLKYFSHYMEENLMDGGDLPSVTDIRRPRLYLLQWLKSDKALMMLFNDGTFQVNFYHDHTKIIICSQNEEYLLTYINEDRISTTFRLTTLLMSGCSSELKNRMEYALNMLLQRCN

SEQ ID NO: 195 - protein, 881 aa, Homo sapiens
MAAPGAPAEYGYIRTVLGQQILGQLDSSSLALPSEAKLKLAGSSGRGGQTVKSLRIQEQVQQTLARKGRSSVGNGNLHRTSSVPEYVYNLHLVENDFVGGRSPVPKTYDMLKAGTTATYEGRWGRGTAQYSSQKSVEERSLRHPLRRLEISPDSSPERAHYTHSDYQYSQRSQAGHTLHHQESRRAALLVPPRYARSEIVGVSRAGTTSRQRHFDTYHRQYQHGSVSDTVFDSIPANPALLTYPRPGTSRSMGNLLEKENYLTAGLTVGQVRPLVPLQPVTQNRASRSSWHQSSFHSTRTLREAGPSVAVDSSGRRAHLTVGQAAAGGSGNLLTERSTFTDSQLGNADMEMTLERAVSMLEADHMPPSRISAAATFIQHECFQKSEARKRVNQLRGILKLLQLLKVQNEDVQRAVCGALRNLVFEDNDNKLEVAELNGVPRLLQVLKQTRDLETKKQITDHTVNLRSRNGWPGAVAHACNPSTLGGQGGRITRSGVRDQPDQHGLLWNLSSNDKLKNLMITEALLTLTENIIIPFSGWPEGDYPKANGLLDFDIFYNVTGCLRNMSSAGADGRKAMRRCDGLIDSLVHYVRGTIADYQPDDKATENCVCILHNLSYQLEAELPEKYSQNIYIQNRNIQTDNNKSIGCFGSRSRKVKEQYQDVPMPEEKSNPKGVEWLWHSIVIRMYLSLIAKSVRNYTQEASLGALQNLTAGSGPMPTSVAQTVVQKESGLQHTRKMLHVGDPSVKKTAISLLRNLSRNLSLQNEIAKETLPDLVSIIPDTVPSTDLLIETTASACYTLNNIIQNSYQNARDLLNTGGIQKIMAISAGDAYASNKASKAASVLLYSLWAHTELHHAYKKAQFKKTDFVNSRTAKAYHSLKD

SEQ ID NO: 196 - protein, 277 aa, Homo sapiens
MVRLPLQCVLWGCLLTAVHPEPPTACREKQYLINSQCCSLCQPGQKLVSDCTEFTETECLPCGESEFLDTWNRETHCHQHKYCDPNLGLRVQQKGTSETDTICTCEEGWHCTSEACESCVLHRSCSPGFGVKQIATGVSDTICEPCPVGFFSNVSSAFEKCHPWTSCETKDLVVQQAGTNKTDVVCGPQDRLRALVVIPIIFGILFAILLVLVFIKKVAKKPTNKAPHPKQEPQEINFPDDLPGSNTAAPVQETLHGCQPVTQEDGKESRISVQERQ

SEQ ID NO: 197 - protein, 488 aa, Homo sapiens
MTSPVLVDIREEVTCPICLELLTEPLSIDCGHSFCQACITPNGRESVIGQEGERSCPVCQTSYQPGNLRPNRHLANIVRRLREVVLGPGKQLKAVLCADHGEKLQLFCQEDGKVICWLCERSQEHRGHHTFLVEEVAQEYQEKFQESLKKLKNEEQEAEKLTAFIREKKTSWKNQMEPERCRIQTEFNQLRNILDRVEQRELKKLEQEEKKGLRIIEEAENDLVHQTQSLRELISDLERRCQGSTMELLQDVSDVTERSEFWTLRKPEALPTKLRSMFRAPDLKRMLRVCRELTDVQSYWVDVTLNPHTANLNLVLAKNRRQVRFVGAKVSGPSCLEKHYDCSVLGSQHFSSGKHYWEVDVAKKTAWILGVCSNSLGPTFSFNHFAQNHSAYSRYQPQSGYWVIGLQHNHEYRAYEDSSPSLLLSMTVPPRRVGVFLDYEAGTVSFYNVTNHGFPIYTFSKYYFPTTLCPYFNPCNCVIPMTLRRPSS

SEQ ID NO: 198 - protein, 276 aa, Homo sapiens
MALLDVCGAPRGQRPESALPVAGSGRRSDPGHYSFSMRSPELALPRGMKPTEFFQSLGGDGERNVQIEMAHGTTTLAFKFQHGVIAAVDSRASAGSYISALRVNKVIEINPYLLGTMSGCAADCQYWERLLAKECRLYYLRNGERISVSAASKLLSNMMCQYRGMGLSMGSMICGWDKKGPGLYYVDEHGTRLSGNMFSTGSGNTYAYGVMDSGYRPNLSPEEAYDLGRRAIAYATHRDSYSGGVVNMYHMKEDGWVKVESTDVSDLLHQYREANQ

SEQ ID NO: 199 - protein, 574 aa, Homo sapiens
MCPRAARAPATLLLALGAVLWPAAGAWELTILHTNDVHSRLEQTSEDSSKCVNASRCMGGVARLFTKVQQIRRAEPNVLLLDAGDQYQGTIWFTVYKGAEVAHFMNALRYDAMALGNHEFDNGVEGLIEPLLKEAKFPILSANIKAKGPLASQISGLYLPYKVLPVGDEVVGIVGYTSKETPFLSNPGTNLVFEDEITALQPEVDKLKTLNVNKIIALGHSGFEMDKLIAQKVRGVDVVVGGHSNTFLYTGNPPSKEVPAGKYPFIVTSDDGRKVPVVQAYAFGKYLGYLKIEFDERGNVISSHGNPILLNSSIPEDPSIKADINKWRIKLDNYSTQELGKTIVYLDGSSQSCRFRECNMGNLICDAMINNNLRHTDEMFWNHVSMCILNGGGIRSPIDERNNGTITWENLAAVLPFGGTFDLVQLKGSTLKKAFEHSVHRYGQSTGEFLQVGGIHVVYDLSRKPGDRVVKLDVLCTKCRVPSYDPLKMDEVYKVILPNFLANGGDGFQMIKDELLRHDSGDQDINVVSTYISKMKVIYPAVEGRIKFSTGSHCHGSFSLIFLSLWAVIFVLYQ

SEQ ID NO: 200 - protein, 430 aa, Homo sapiens
GGLRVVSPFPLCQPAGEPSRGKMRSSCVLLTALVALATYYVYIPLPGSVSDPWKLMLLDATFRGAQQVSNLIHYLGLSHHLLALNFIIVSFGKKSAWSSAQVKVTDTDFDGVEVRVFEGPPKPEEPLKRSVVYIHGGGWALASAKIRYYDELCTAMAEELNAVIVSIEYRLVPKVYFPEQIHDVVRATKYFLKPEVLQKYMVDPGRICISGDSAGGNLAAALGQQFTQDASLKNKLKLQALIYPVLQALDFNTPSYQQNVNTPILPRYVMVKYWVDYFKGNYDFVQAMIVNNHTSLDVEEAAAVRARLNWTSLLPASFTKNYKPVVQTTGNARIVQELPQLLDARSAPLIADQAVLQLLPKTYILTCEHDVLRDDGIMYAKRLESAGVEVTLDHFEDGFHGCMIFTSWPTNFSVGIRTRNSYIKWLDQNL

SEQ ID NO: 201 - protein, 139 aa, Homo sapiens
MDKFWWHAAWGLCLVPLSLAQIDLNITCRFAGVFHVEKNGRYSISRTEAADLCKAFNSTLPTMAQMEKALSIGFETCSLHCSQQSKKVWAEEKASDQQWQWSCGGQKAKWTQRRGQQVSGNGAFGEQGVVRNSRPVYDS

SEQ ID NO: 202 - protein, 372 aa, Homo sapiens
MATSPQKSPSVPKSPTPKSPPSRKKDDSFLGKLGGTLARRKKAKEVSELQEEGMNAINLPLSPIPFELDPEDTMLEENEVRTMVDPNSRSDPKLQELMKVLIDWINDVLVGERIIVKDLAEDLYDGQVLQKLFEKLESEKLNVAEVTQSEIAQKQKLQTVLEKINETLKLPPRSIKWNVDSVHAKSLVAILHLLVALSQYFRAPIRLPDHVSIQVVVVQKREGILQSRQIQEEITGNTEALSGRHERDAFDTLFDHAPDKLNVVKKTLITFVNKHLNKLNLEVTELETQFADGVYLVLLMGLLEGYFVPLHSFFLTPDSFEQKVLNVSFAFELMQDGGLEKPKPRPEDIVNCDLKSTLRVLYNLFTKYRNVE

SEQ ID NO: 203 - protein, 710 aa, Homo sapiens
MEEMEEELKCPVCGSFYREPIILPCSHNLCQACARNILVQTPESESPQSHRAAGSGVSDYDYLDLDKMSLYSEADSGYGSYGGFASAPTTPCQKSPNGVRVFPPAMPPPATHLSPALAPVPRNSCITCPQCHRSLILDDRGLRGFPKNRVLEGVIDRYQQSKAAALKCQLCEKAPKEATVMCEQCDVFYCDPCRLRCHPPRGPLAKHRLVPPAQGRVSRRLSPRKVSTCTDHELENHSMYCVQCKMPVCYQCLEEGKHSSHEVKALGAMWKLHKSQLSQALNGLSDRAKEAKEFLVQLRNMVQQIQENSVEFEACLVAQCDALIDALNRRKAQLLARVNKEHEHKLKVVRDQISHCTVKLRQTTGLMEYCLEVIKENDPSGFLQISDALIRRVHLTEDQWGKGTLTPRMTTDFDLSLDNSPLLQSIHQLDFVQVKASSPVPATPILQLEECCTHNNSATLSWKQPPLSTVPADGYILELDDGNGGQFREVYVGKETMCTVDGLHFNSTYNARVKAFNKTGVSPYSKTLVLQTSEVAWFAFDPGSAHSDIILSNDNLTVTCSSYDDRVVLGKTGFSKGIHYWELTVDRYDNHPDPAFGVARMDVMKDVMLGKDDKAWAMYVDNNRSWFMHNNSHTNRTEGGITKGATIGVLLDLNRKNLTFFINDEQQGPIAFDNVEGLFFPAVSLNRNVQVTLHTGLPVPDFYSSRASIA

SEQ ID NO: 204 - protein, 231 aa, Homo sapiens
MSKQRGTFSEVSLAQDPKRQQRKPKGNKSSISGTEQEIFQVELNLQNPSLNHQGIDKIYDCQGLLPPPEKLTAEVLGIICIVLMATVLKTIVLIPFLEQNNSSPNTRTQKARHCGHCPEEWITYSNSCYYIGKERRTWEESLLACTSKNSSLLSIDNEEEMKFLASILPSSWIGVFRNSSHHPWVTINGLAFKHKIKDSDNAELNCAVLQVNRLKSAQCGSSMIYHCKHKL

SEQ ID NO: 205 - protein, 1026 aa, Homo sapiens
MMSFGGADALLGAPFAPLHGGGSLHYALARKGGAGGTRSAAGSSSGFHSWTRTSVSSVSASPSRFRGAGAASSTDSLDTLSNGPEGCMVAVATSRSEKEQLQALNDRFAGYIDKVRQLEAHNRSLEGEAAALRQQQAGRSAMGELYEREVREMRGAVLRLGAARGQLRLEQEHLLEDIAHVRQRLDDEARQREEAEAAARALARFAQEAEAARVDLQKKAQALQEECGYLRRHHQEEVGELLGQIQGSGAAQAQMQAETRDALKCDVTSALREIRAQLEGHAVQSTLQSEEWFRVRLDRLSEAAKVNTDAMRSAQEEITEYRRQLQARTTELEALKSTKDSLERQRSELEDRHQADIASYQEAIQQLDAELRNTKWEMAAQLREYQDLLNVKMALDIEIAAYRKLLEGEECRIGFGPIPFSLPEGLPKIPSVSTHIKVKSEEKIKVVEKSEKETVIVEEQTEETQVTEEVTEEEEKEAKEEEGKEEEGGEEEEAEGGEEETKSPPAEEAASPEKEAKSPVKEEAKSPAEAKSPEKEEAKSPAEVKSPEKAKSPAKEEAKSPPEAKSPEKEEAKSPAEVKSPEKAKSPAKEEAKSPAEAKSPEKAKSPVKEEAKSPAEAKSPVKEEAKSPAEVKSPEKAKSPTKEEAKSPEKAKSPEKAKSPEKEEAKSPEKAKSPVKAEAKSPEKAKSPVKAEAKSPEKAKSPVKEEAKSPEKAKSPVKEEAKSPEKAKSPVKEEAKTPEKAKSPVKEEAKSPEKAKSPEKAKTLDVKSPEAKTPAKEEARSPADKFPEKAKSPVKEEVKSPEKAKSPLKEDAKAPEKEIPKKEEVKSPVKEEEKPQEVKVKEPPKKAEEEKAPATPKTEEKKDSKKEEAPKKEAPKPKVEEKKEPAVEKPKESKVEAKKEEAEDKKKVPTPEKEAPAKVEVKEDAKPKEKTEVAKKEPDDAKAKEPSKPAEKKEAAPEKKDTKEEKAKKPEEKPKTEAKAKEDDKTLSKEPSKPKAEKAEKSSSTDQKDSKPPEKATEDKAAKGK

SEQ ID NO: 206 - protein, 411 aa, Homo sapiens
MKAARFVLRSAGSLNGAGLVPREVEHFSRYSPSPLSMKQLLDFGSENACERTSFAFLRQELPVRLANILKEIDILPTQLVNTSSVQLVKSWYIQSLMDLVEFHEKSPDDQKALSDFVDTLIKVRNRHHNVVPTMAQGIIEYKDACTVDPVTNQNLQYFLDRFYMNRISTRMLMNQHILIFSDSQTGNPSHIGSIDPNCDVVAVVQDAFECSRMLCDQYYLSSPELKLTQVNGKFPDQPIHIVYVPSHLHHMLFELFKNAMRATVEHQENQPSLTPIEVIVVLGKEDLTIKISDRGGGVPLRIIDRLFSYTYSTAPTPVMDNSRNAPLAGFGYGLPISRLYAKYFQGDLNLYSLSGYGTDAIIYLKALSSESIEKLPVFNKSAFKHYQMSSEADDWCIPSREPKNLAKEVAM

SEQ ID NO: 207 - protein, 736 aa, Homo sapiens
MKKSRSVMTVMADDNVKDYFECSLSKSYSSSSNTLGIDLWRGRRCCSGNLQLPPLSQRQSERARTPEGDGISRPTTLPLTTLPSIAITTVSQECFDVENGPSPGRSPLDPQASSSAGLVLHATFPGHSQRRESFLYRSDSDYDLSPKAMSRNSSLPSEQHGDDLIVTPFAQVLASLRSVRNNFTILTNLHGTSNKRSPAASQPPVSRVNPQEESYQKLAMETLEELDWCLDQLETIQTYRSVSEMASNKFKRMLNRELTHLSEMSRSGNQVSEYISNTFLDKQNDVEIPSPTQKDREKKKKQQLMTQISGVKKLMHSSSLNNTSISRFGVNTENEDHLAKELEDLNKWGLNIFNVAGYSHNRPLTCIMYAIFQERDLLKTFRISSDTFITYMMTLEDHYHSDVAYHNSLHAADVAQSTHVLLSTPALDAVFTDLEILAAIFAAAIHDVDHPGVSNQFLINTNSELALMYNDESVLENHHLAVGFKLLQEEHCDIFMNLTKKQRQTLRKMVIDMVLATDMSKHMSLLADLKTMVETKKVTSSGVLLLDNYTDRIQVLRNMVHCADLSNPTKSLELYRQWTDRIMEEFFQQGDKERERGMEISPMCDKHTASVEKSQVGFIDYIVHPLWETWADLVQPDAQDILDTLEDNRNWYQSMIPQSPSPPLDEQNRDCQGLMEKFQFELTLDEEDSEGPEKEGEGHSYFSSTKTLCVIDPENRDSLGETDIDIATEDKSPVDT

SEQ ID NO: 208 - protein, 346 aa, Homo sapiens
MEEKYLPELMAEKDSLDPSFTHALRLVNQEIEKFQKGEGKDEEKYIDVVINKNMKLGQKVLIPVKQFPKFNFVGKLLGPRGNSLKRLQEETLTKMSILGKGSMRDKAKEEELRKSGEAKYFHLNDDLHVLIEVFAPPAEAYARMGHALEEIKKFLIPDYNDEIRQAQLQELTYLNGGSENADVPVVRGKPTLRTRGVPAPAITRGRGGVTARPVGVVVPRGTPTPRGVLSTRGPVSRGRGLLTPRARGVPPTGYRPPPPPPTQETYGEYDYDDGYGTAYDEQSYDSYDNSYSTPAQSGADYYDYGHGLSEETYDSYGQEEWTNSRHKAPSARTAKGVYRDQPYGRY

SEQ ID NO: 209 - protein, 205 aa, Homo sapiens
MKEQPSCAGTGHPSMAGYGRMAPFELASGPVKRLRTESPFPCLFAEEAYQKLASETLEELDWCLDQLETLQTRHSVSEMASNKFKRMLNRELTHLSEMSRSGNQVSEFISNTFLDKQHEVEIPSPTQKEKEKKKRPMSQISGVKKLMHSSSLTNSSIPRFGVKTEQEDVLAKELEDVNKWGLHVFRIAELSGNRPLTVIMHTIFQ

SEQ ID NO: 210 - protein, 216 aa, Homo sapiens
MRPRSGPTRNPRLRAFAGVPTRGRTRGQSRRCAAEASAGPERDARPGAPAAGTMGAAHSASEEVRELEGKTGFSSDQIEQLHRRFKQLSGDQPTIRKENFNNVPDLELNPIRSKIVRAFFDNRNLRKGPSGLADEINFEDFLTIMSYFRPIDTTMDEEQVELSRKEKLRFLFHMYDSDSDGRITLEEYRNVKWSRSCCRETLTSRRSPLAPSPTGP

SEQ ID NO: 211 - protein, 160 aa, Homo sapiens
MPPQSIIGDVVCNSPPFFKGSILSRLKKESICPTPPVYEEHEDPSGSLHLAATSSINDSRMSTKTTSILKLPTKAPGLIPYITKPSTQLPGPYCPIPCNCKVLSPSGLLIHCQERNIESLSDLRPPPQNPRKLILAGNIIHSLMKSILWSKASGRGRREE

SEQ ID NO: 212 - protein, 457 aa, Homo sapiens
MLGAVKMEGHEPSDWSSYYAEPEGYSSVSNMNAGLGMNGMNTYMSMSAAAMGSGSGNMSAGSMNMSSYVGAGMSPSLAGMSPGAGAMAGMGGSAGAAGVAGMGPHLSPSLSPLGGQAAGAMGGLAPYANMNSMSPMYGQAGLSRARDPKTYRRSYTHAKPPYSYISLITMAIQQSPNKMLTLSEIYQWIMDLFPFYRQNQQRWQNSIRHSLSFNDCFLKVPRSPDKPGKGSFWTLHPDSGNMFENGCYLRRQKRFKCEKQLALKEAAGAAGSGKKAAAGAQASQAQLGEAAGPASETPAGTESPHSSASPCQEHKRGGLGELKGTPAAALSPPEPAPSPGQQQQAAAHLLGPPHHPGLPPEAHLKPEHHYAFNHPFSINNLMSSEQQHHHSHHHHQPHKMDLKAYEQVMHYPGYGSPMPGSLAMGPVTNKTGLDASPLAADTSYYQGVYSRPIMNSS

SEQ ID NO: 213 - protein, 773 aa, Homo sapiens
MSRRKQGKPQHLSKREFSPEPLEAILTDDEPDHGPLGAPEGDHDLLTCGQCQMNFPLGDILIFIEHKRKQCNGSLCLEKAVDKPPSPSPIEMKKASNPVEVGIQVTPEDDDCLSTSSRRICPKQEHIADKLLHWRGLSSPRSAHGALIPTPGMSAEYAPQGICKDEPSSYTCTTCKQPFTSAWFLLQHAQNTHGLRIYLESEHGSPLTPRVGIPSGLGAECPSQPPLHGIHIADNNPFNLLRIPGSVSREASGLAEGRFPPTPPLFSPPPRHHLDPHRIERLGAEEMALATHHPSAFDRVLRLNPMAMEPPAMDFSRRLRELAGNTSSPPLSPGRPSPMQRLLQPFQPGSKPPFLATPPLPPLQSAPPPSQPPVKSKSCEFCGKTFKFQSNLVVHRRSHTGEKPYKCNLCDHACTQASKLKRHMKTHMHKSSPMTVKSDDGLSTASSPEPGTSDLVGSASSALKSVVAKFKSENDPNLIPENGDEEEEEDDEEEEEEEEEEEEELTESERVDYGFGLSLEAARHHENSSRGAVVGVGDESRALPDVMQGMVLSSMQHFSEAFHQVLGEKHKRGHLAEAEGHRDTCDEDSVAGESDRIDDGTVNGRGCSPGESASGGLSKKLLLGSPSSLSPFSKRIKLEKEFDLPPATMPNTENVYSQWLAGYAASRQLKDPFLSFGDSRQSPFASSSEHSSENGSLRFSTPPGELDGGISGRSGTGSGGSTPHISGPGTGRPSSKEGRRSDTCSSHTPIRRSTQRAQDVWQFSDGSSRALKF

SEQ ID NO: 214 - protein, 363 aa, Homo sapiens [sequence omitted]

SEQ ID NO: 215 - protein, 309 aa, Homo sapiens
MVGFKATDVPPTATVKFLGAGTAACIADLITFPLDTAKVRLQIQGESQGPVRATASAQYRGVMGTILTMVRTEGPRSLYNGLVAGLQRQMSFASVRIGLYDSVKQFYTKGSEHASIGSRLLAGSTTGALAVAVAQPTDVVKVRFQAQARAGGGRRYQSTVNAYKTIAREEGFRGLWKGTSPNVARNAIVNCAELVTYDLIKDALLKANLMTDDLPCHFTSAFGAGFCTTVIASPVDVVKTRYMNSALGQYSSAGHCALTMLQKEGPRAFYKGFMPSFLRLGSWNVVMFVTYEQLKRALMAACTSREAPF

SEQ ID NO: 216 - protein, 364 aa, Homo sapiens
MSEVEAAAVATAVPAATVPATAAGVVAVVVPVPAGEPQKGGGAGGGGGAASGPAAGTPSAPGSRTPGNPATAVSGTPAPPARSQADKPVLAIQVLGTVKWFNVRNGYGFINRNDTKEDVFVHQTAIKRNNPRKFLRSVGDGETVEFDVVEGEKGAEATNVTGPGGVPVKGSRYAPNRRKSRRFIPRPPSVAPPPMVAEIPSAGTGPGSKGERAEDSGQRPRRWCPPPFFYRRRFVRGPRPPNQQQPIEGTDRVEPKETAPLEGHQQQGDERVPPPRFRPRYRRPFRPRPRQQPTTEGGDGETKPSQGPADGSRPEPQRPRNRPYFQRRRQQAPGPQQAPGPRQPAAPETSAPVNSGDPTTTILE

SEQ ID NO: 217 - protein, 1015 aa, Homo sapiens
MGPPLPLLLLLLLLLPPRVLPAAPSSVPRGRQLPGRLGCLLEEGLCGASEACVNDGVFGRCQKVPAMDFYRYEVSPVALQRLRVALQKLSGTGFTWQDDYTQYVMDQELADLPKTYLRRPEASSPARPSKHSVGSERRYSREGGAALANALRRHLPFLEALSQAPASDVLARTHTAQDRPPAEGDDRFSESILTYVAHTSALTYPPGPRTQLREDLLPRTLGQLQPDELSPKVDSGVDRHHLMAALSAYAAQRPPAPPGEGSLEPQYLLRAPSRMPRPLLAPAAPQKWPSPLGDSEDPSSTGDGARIHTLLKDLQRQPAEVRGLSGLELDGMAELMAGLMQGVDHGVARGSPGRAALGESGEQADGPKATLRGDSFPDDGVQDDDDRLYQEVHRLSATLGGLLQDHGSRLLPGALPFARPLDMERKKSEHPESSLSSEEETAGVENVKSQTYSKDLLGQQPHSEPGAAAFGELQNQMPGPSKEEQSLPAGAQEALSDGLQLEVQPSEEEARGYIVTDRDPLRPEEGRRLVEDVARLLQVPSSAFADVEVLGPAVTFKVSANVQNVTTEDVEKATVDNKDKLEETSGLKILQTGVGSKSKLKFLPPQAEQEDSTKFIALTLVSLACILGVLLASGLIYCLRHSSQHRLKEKLSGLGGDPGADATAAYQELCRQRMATRPPDRPEGPHTSRISSVSSQFSDGPIPSPSARSSASSWSEEPVQSNMDISTGHMILSYMEDHLKNKNRLEKEWEALCAYQAEPNSSFVAQREENVPKNRSLAVLTYDHSRVLLKAENSHSHSDYINASPIMDHDPRNPAYIATQGPLPATVADFWQMVWESGCVVIVMLTPLAENGVRQCYHYWPDEGSNLYHIYEVNLVSEHIWCEDFLVRSFYLKNLQTNETRTVTQFHFLSWYDRGVPSSSRSLLDFRRKVNKCYRGRSCPIIVHCSDGAGRSGTYVLIDMVLNKMAKGAKEIDIAATLEHLRDQRPGMVQTKEQFEFALTAVAEEVNAILKALPQ

SEQ ID NO: 218 - protein, 272 aa, Homo sapiens
MRRSRSSAAAKLRGQKRSGASAAPAASAAAALAPSATRTRRSASQAGSKSQAVEKPPSEKPRLRRSSPRAQEEGPGEPPPPELALLPPPPPPPPTPATPTSSASNLDLGEQRERWETFQKRQKLTSEGAAKLLLDTFEYQGLVKHTGGCHCGAVRFEVWASADLHIFDCNCSICKKKQNRHFIVPASRFKLLKGAEHITTYTFNTHKAQHTFCKRCGVQSFYTPRSNPGGFGIAPHCLDEGTVRSMVTEEFNGSDWEKAMKEHKTIKNMSKE

SEQ ID NO: 219 - protein, 476 aa, Homo sapiens
MAGRGGSALLALCGALAACGWLLGAEAQEPGAPAAGMRRRRRLQQEDGISFEYHRYPELREALVSVWLQCTAISRIYTVGRSFEGRELLVIELSDNPGVHEPGEPEFKYIGNMHGNEAVGRELLIFLAQYLCNEYQKGNETIVNLIHSTRIHIMPSLNPDGFEKAASQPGELKDWFVGRSNAQGIDLNRNFPDLDRIVYVNEKEGGPNNHLLKNMKKIVDQNTKLAPETKAVIHWIMDIPFVLSANLHGGDLVANYPYDETRSGSAHEYSSSPDDAIFQSLARAYSSFNPAMSDPNRPPCRKNDDDSSFVDGTTNGGAWYSVPGGMQDFNYLSSNCFEITVELSCEKFPPEETLKTYWEDNKNSLISYLEQIHRGVKGFVRDLQGNPIANATISVEGIDHDVTSAKDGDYWRLLIPGNYKLTASAPGYLAITKKVAVPYSPAAGVDFELESFSERKEEEKEELMEWWKMMSETLNF

SEQ ID NO: 220 - protein, 123 aa, Homo sapiens
MARGSALLLASLLLAAALSASAGLWSPAKEKRGWTLNSAGYLLGPHAVGNHRSFSDKNGLTSKRELRPEDDMKPGSFDRSIPENNIMRTIIEFLSFLHLKEAGALDRLLDLPAAASSEDIERS

SEQ ID NO: 221 - protein, 120 aa, Homo sapiens [sequence omitted]

SEQ ID NO: 222 - protein, 245 aa, Homo sapiens
MAAAIASSLIRQKRQAREREKSNACKCVSSPSKGKTSCDKNKLNVFSRVKLFGSKKRRRRRPEPQLKGIVTKLYSRQGYHLQLQADGTIDGTKDEDSTYTLFNLIPVGLRVVAIQGVQTKLYLAMNSEGYLYTSELFTPECKFKESVFENYYVTYSSMIYRQQQSGRGWYLGLNKEGEIMKGNHVKKNKPAAHFLPKPLKVAMYKEPSLHDLTEFSRSGSGTPTKSRSVSGVLNGGKSMSHNEST

SEQ ID NO: 223 - protein, 198 aa, Homo sapiens
MDAILNYRSEDTEDYYTLLGCDELSSVEQILAEFKVRALECHPDKHPENPKAVETFQKLQKAKEILTNEESRARYDHWRRSQMSMPFQQWEALNDSVKTSMHWVVRGKKDLMLEESDKTHTTKMENEECNEQRERKKEELASTAEKTEQKEPKPLEKSVSPQNSDSSGFADVNGWHLRFRWSKDAPSELLRKFRNYEI

SEQ ID NO: 224 - protein, 422 aa, Homo sapiens
MVSESHHEALAAPPVTTVATVLPSNATEPASPGEGKEDAFSKLKEKFMNELHKIPLPPWALIAIAIVAVLLVLTCCFCICKKCLFKKKNKKKGKEKGGKNAINMKDVKDLGKTMKDQALKDDDAETGLTDGEEKEEPKEEEKLGKLQYSLDYDFQNNQLLVGIIQAAELPALDMGGTSDPYVKVFLLPDKKKKFETKVHRKTLNPVFNEQFTFKVPYSELGGKTLVMAVYDFDRFSKHDIIGEFKVPMNTVDFGHVTEEWRDLQSAEKEEQEKLGDICFSLRYVPTAGKLTVVILEAKNLKKMDVGGLSDPYVKIHLMQNGKRLKKKKTTIKKNTLNPYYNESFSFEVPFEQIQKVQVVVTVLDYDKIGKNDAIGKVFVGYNSTGAELRHWSDMLANPRRPIAQWHTLQVEEEVDAMLAVKK

SEQ ID NO: 225 - protein, 206 aa, Homo sapiens
MAEDADMRNELEEMQRRADQLADESLESTRRMLQLVEESKDAGIRTLVMLDEQGEQLERIEEGMDQINKDMKEAEKNLTDLGKFCGLCVCPCNKLKSSDAYKKAWGNNQDGVVASQPARVVDEREQMAISGGFIRRVTNDARENEMDENLEQVSGIIGNLRHMALDMGNEIDTQNRQIDRIMEKADSNKTRIDEANQRATKMLGSG

SEQ ID NO: 226 - protein, 134 aa, Homo sapiens
MKAFSPVRSVRKNSLSDHSLGISRSKTPVDDPMSLLYNMNDCYSKLKELVPSIPQNKKVSKMEILQHVIDYILDLQIALDSHPTIVSLHHQRPGQNQASRTPLTTLNTDISILSLQASEFPSELMSNDSKALCG

SEQ ID NO: 227 - protein, 328 aa, Homo sapiens
MLPRVGCPALPLPPPPLLPLLPLLLLLLGASGGGGGARAEVLFRCPPCTPERLAACGPPPVAPPAAVAAVAGGARMPCAELVREPGCGCCSVCARLEGEACGVYTPRCGQGLRCYPHPGSELPLQALVMGEGTCEKRRDAEYGASPEQVADNGDDHSEGGLVENHVDSTMNMLGGGGSAGRKPLKSGMKELAVFREKVTEQHRQMGKGGKHHLGLEEPKKLRPPPARTPCQQELDQVLERISTMRLPDERGPLEHLYSLHIPNCDKHGLYNLKQCKMSLNGQRGECWCVNPNTGKLIQGAPTIRGDPECHLFYNEQQEARGVHTQRMQ

SEQ ID NO: 228 - protein, 551 aa, Homo sapiens
NCLLRPKNKSVRWGPGAGAALLRPSPAALGAGSRACSVPPAAPAQTPRPQVSAPAWGPGRAARGSGRMERRMKAGYLDQQVPYTFSSKSPGNGSLREALIGPLGKLMDPGSLPPLDSEDLFQDLSHFQETWLAEAQVPDSDEQFVPDFHSENLAFHSPTTRIKKEPQSPRTDPALSCSRKPPLPYHHGEQCLYSSAYDPPRQIAIKSPAPGALGQSPLQPFPRAEQRNFLRSSGTSQPHPGHGYLGEHSSVFQQPLDICHSFTSQGGGREPLPAPYQHQLSEPCPPYPQQSFKQEYHDPLYEQAGQPAVDQGGVNGHRYPGAGVVIKQEQTDFAYDSDVTGCASMYLHTEGFSGPSPGDGAMGYGYEKPLRPFPDDVCVVPEKFEGDIKQEGVGAFREGPPYQRRGALQLWQFLVALLDDPTNAHFIAWTGRGMEFKLIEPEEVARLWGIQKNRPAMNYDKLSRSLRYYYEKGIMQKVAGERYVYKFVCEPEALFSLAFPDNQRPALKAEFDRPVSEEDTVPLSHLDESPAYLPELAGPAQPFGPKGGYSY

SEQ ID NO: 229 - protein, 473 aa, Homo sapiens [sequence omitted]

SEQ ID NO: 230 - protein, 458 aa, Homo sapiens
MDSVELCLPESFSLHYEEELLCRMSNKDRHIDSSCSSFIKTEPSSPASLTDSVNHHSPGGSSDASGSYSSTMNGHQNGLDSPPLYPSAPILGGSGPVRKLYDDCSSTIVEDPQTKCEYMLNSMPKRLCLVCGDIASGYHYGVASCEACKAFFKRTIQGNIEYSCPATNECEITKRRRKSCQACRFMKCLKVGMLKEGVRLDRVRGGRQKYKRRIDAENSPYLNPQLVQPAKKPYNKIVSHLLVAEPEKIYAMPDPTVPDSDIKALTTLCDLADRELVVIIGWAKHIPGFSTLSLADQMSLLQSAWMEILILGVVYRSLSFEDELVYADDYIMDEDQSKLAGLLDLNNAILQLVKKYKSMKLEKEEFVTLKAIALANSDSMHIEDVEAVQKLQDVLHEALQDYEAGQHMEDPRRAGKMLMTLPLLRQTSTKAVQHFYNIKLEGKVPMHKLFLEMLEAKV

SEQ ID NO: 231 - protein, 1299 aa, Homo sapiens [sequence omitted]

SEQ ID NO: 232 - protein, 71 aa, Homo sapiens
MERARDRLHLRRTTEQHVPEVEVQVKRRRTASLSNQECQLYPRRSQQQQVPVVDFQAELRQAFLAETPRGG

SEQ ID NO: 233 - protein, 296 aa, Homo sapiens
MEPSGGEQEPGAVRFLDLPWEDVLLPHVLNRVPLRQLLRLQRVSRAFRSLVQLHLAGLRRFDAAQVGPQIPRAALARLLRDAEGLQELALAPCHEWLSDEDLVPVLARNPQLRSVALGGCGQLSRRALGALAEGCPRLQRLSLAHCDWVDGLALRGLADRCPALEELDLTACRQLKDEAIVYLAQRRGAGLRSLSLAVNANVGDAAVQELARNCPELHHLDLTGCLRVGSDGVRTLAEYCPVLRSLRVRHCHHVAESSLSRLRKRGVDIDVEPPLHQALVLLQDMAGFAPFVNLQV

SEQ ID NO: 234 - protein, 211 aa, Homo sapiens
MQSAMFLAVQHDCRPMDKSAGSGHKSEEKREKMKRTLLKDWKTRLSYFLQNSSTPGKPKTGKKSKQQAFIKPSPEEAQLWSEAFDELLASKYGLAAFRAFLKSEFCEENIEFWLACEDFKKTKSPQKLSSKARKIYTDFIEKEAPKEINIDFQTKTLIAQNIQEATSGCFTTAQKRVYSLMENNSYPRFLESEFYQDLCKKPQITTEPHAT

SEQ ID NO: 235 - protein, 417 aa, Homo sapiens
MAGPFSRLLSARPGLRLLALAGAGSLAAGFLLRPEPVRAASERRRLYPPSAEYPDLRKHNNCMASHLTPAVYARLCDKTTPTGWTLDQCIQTGVDNPGHPFIKTVGMVAGDEETYEVFADLFDPVIQERHNGYDPRTMKHTTDLDASKIRSGYFDERYVLSSRVRTGRSIRGLSLPPACTRAERREVERVVVDALSGLKGDLAGRYYRLSEMTEAEQQQLIDDHFLFDKPVSPLLTAAGMARDWPDARGIWHNNEKSFLIWVNEEDHTRVISMEKGGNMKRVFERFCRGLKEVERLIQERGWEFMWNERLGYILTCPSNLGTGLRAGVHIKLPLLSKDSRFPKILENLRLQKRGTGGVDTAATGGVFDISNLDRLGKSEVELVQLVIDGVNYLIDCERRLERGQDIRIPTPVIHTKH

SEQ ID NO: 236 - protein, 78 aa, Homo sapiens
MRTDSSKMTDVESGVANFASSARAGRRNALPDIQSSAATDGTSDLPLKLEALSVKEDAKEKDEKTTQDQLEKPQNEEK

SEQ ID NO: 237 - protein, 314 aa, Homo sapiens
LQQWIQKLSKNTVTDDILCTSPGHLDKKELKALNSEILCPGLVNNPSMPTQTSYLMVTTPATTTNTADTILRSLTDAVPLSVLILGLLIMFITIVFCAAGIVVLVLHRRRRYKKKQVDEQMRDNSPVHLQYSMYGHKTTHHTTERPSASLYEQHMVSPMVHVYRSPSFGPKHLEEEEERNEKEGSDAKHLQRSLLEQENHSPLTGSNMKYKTTNQSTEFLSFQDASSLYRNILEKERELQQLGITEYLRKNIAQLQPDMEAHYPGAHEELKLMETLMYSRPRKVLVEQTKNEYFELKANLHAEPDYLEVLEQQT

SEQ ID NO: 238 - protein, 44 aa, Homo sapiens
SDKPDLSEVEKFDRSKLKKTNTEEKNTLPSKETIQQEKECVQTS

SEQ ID NO: 239 - protein, 593 aa, Homo sapiens
YATLQMLSLWFSRCAEEVKSPGEEASKAKVHYNVEFTFDTDARVAITIYYQATEEFQNGIASYIPKDNSLQSETVQYKRGVCQQFCLPSHTVDPSEWAEEELGFDLDREVYPLVVHAVVDEGDEYFGHCHVLLGTFEKHTDGTFCVKPLKQKQVVDGVSYLLQEIYGIENKYNTQDSKVAEDEVSDNSAECVVCLSDVRDTLILPCRHLCLCNTCADTLRYQANNCPICRLPFRALLQIRAMRKKLGPLSPTSFNPIISSQTSDSEEHPSSENIPPGYEVVSLLEALNGPLTPSPAVPPLHVLGDGHLSGMLPSYGSDGHLPPVRTISPLDRLSDSSSQGLKLKKSLSKSTSQNSSVLHEEEDEHSCSESETQLSQRPSVQHLGEECGVTPESENLTLSSSGAIDQSSCTGTPLSSTISSPEGPASSSLAQSVMSMASSQISTDTVSSMSGSYIAPGTEEEGEALSSPQPASRAPSEEGEGLPAESPDSNFAGLPAGEQDAEGNDVIEEEDGSPTQEGQRTCAFLGMECDNNNDFDIASVKALDNKLCSEVCLPGAWQADDNAVSRNAQRRRLSSSSLEDSETRPCVWGPLAV

SEQ ID NO: 240 - protein, 138 aa, Homo sapiens
EEADIAARRHTGVIPTHHQFITNERFGDLLNIDDTAKRKSGSEMRPARAKFDFKAQTLKELPLQKGDIVYIYKQIDQNWYEGEHHGRVGIFPRTYIELLPPAEKAQPKKFDTSAGFWNMEKLLLSLTLMVIHKLEMSF

SEQ ID NO: 241 - protein, 525 aa, Homo sapiens
MHRAPSPTAEQPPGGGDSARRTLQPRLKPSARAMALPRTLGELQLYRVLQRANLLSYYETFIQQGGDDVQQLCEAGEEEFLEIMALVGMATKPLHVRRLQKALREWATNPGLFSQPVPAVPVSSIPLFKISETAGTRKGSMSNGHGSPGEKAGSARSFSPKSPLELGEKLSPLPGGPGAGDPRIWPGRSTPESDVGAGGEEEAGSPPFSPPAGGGVPEGTGAGGLAAGGTGGGPDRLEPEMVRMVVESVERIFRSFPRGDAGEVTSLLKLNKKLARSVGHIFEMDDNDSQKEEEIRKYSIIYGRFDSKRREGKQLSLHELTINEAAAQFCMRDNTLLLRRVELFSLSRQVARESTYLSSLKGSRLHPEELGGPPLKKLKQEVGEQSHPEIQQPPPGPESYVPPYRPSLEEDSASLSGESLDGHLQAVGSCPRLTPPPADLPLALPAHGLWSRHILQQTLMDEGLRLARLVSHDRVGRLSPCVPAKPPLAEFEEGLLDRCPAPGPHPALVEGRRSSVKVEAEASRQ

SEQ ID NO: 242 - protein, 134 aa, Homo sapiens
MADIEQYYMKPPGSCFWVAVLDGNVVGIVAARAHEEDNTVELLRMSVDSRFRGKGIAKALGRKVLEFAVVHNYSAVVLGTTAVKVAAHKLYESLGFRHMGASDHYVLPGMTLSLAERLFFQVRYHRYRLQLREE

SEQ ID NO: 243 - DNA, 20 bp, Homo sapiens
caagcattgggtgtttgatg

SEQ ID NO: 244 - DNA, 20 bp, Homo sapiens
cttggggtactcgctatcca

SEQ ID NO: 245 - DNA, 20 bp, Homo sapiens
tgcatcagtgggaactgtgt

SEQ ID NO: 246 - DNA, 20 bp, Homo sapiens
cagcaggaagctttggaaac

SEQ ID NO: 247 - DNA, 20 bp, Homo sapiens
ggtccagttgctgaaagagc

SEQ ID NO: 248 - DNA, 20 bp, Homo sapiens
cttggttaggggtgacagga

SEQ ID NO: 249 - DNA, 20 bp, Homo sapiens
gcctctgctctcacctcatc

SEQ ID NO: 250 - DNA, 20 bp, Homo sapiens
atcttggctgctatggagga

SEQ ID NO: 251 - DNA, 20 bp, Homo sapiens
tgggcactttttcggtattc

SEQ ID NO: 252 - DNA, 20 bp, Homo sapiens
tcacccaaccatttcctctc

SEQ ID NO: 253 - DNA, 20 bp, Homo sapiens
tgtgcccttaaaaccaaacc

SEQ ID NO: 254 - DNA, 20 bp, Homo sapiens
gcaaatctgcccaaagctac

SEQ ID NO: 255 - DNA, 20 bp, Homo sapiens
gtcagtgccttctcctttgg

SEQ ID NO: 256 - DNA, 20 bp, Homo sapiens
cagtccgtagagcaggaagg

SEQ ID NO: 257 - DNA, 20 bp, Homo sapiens
ggagcaggatagtgcctttg

SEQ ID NO: 258 - DNA, 20 bp, Homo sapiens
gactggccatctcctcgtag

SEQ ID NO: 259 - DNA, 20 bp, Homo sapiens
tccagaagccaggactagga

SEQ ID NO: 260 - DNA, 20 bp, Homo sapiens
tgtgtaccaaatggcctcaa

SEQ ID NO: 261 - DNA, 20 bp, Homo sapiens
ttgaggggctgacttcaatc

SEQ ID NO: 262 - DNA, 20 bp, Homo sapiens
gctgcccagaataccaatgt

SEQ ID NO: 263 - DNA, 20 bp, Homo sapiens
cttagtgtcccaacggagga

SEQ ID NO: 264 - DNA, 20 bp, Homo sapiens
ggcgtttggcactagaagag

SEQ ID NO: 265 - DNA, 20 bp, Homo sapiens
atggctcccttcagaggaat

SEQ ID NO: 266 - DNA, 20 bp, Homo sapiens
caaggtgactacaggcagca

SEQ ID NO: 267 - DNA, 20 bp, Homo sapiens
agatggacaacccctcacac

SEQ ID NO: 268 - DNA, 20 bp, Homo sapiens
cattgaccttgatgcctcct

SEQ ID NO: 269 - DNA, 20 bp, Homo sapiens
ctccaagttgccagaaggtc

SEQ ID NO: 270 - DNA, 20 bp, Homo sapiens
cttgatttgggacccatttg

SEQ ID NO: 271 - DNA, 20 bp, Homo sapiens
aaggcagagaggacacagga

SEQ ID NO: 272 - DNA, 20 bp, Homo sapiens
actgaggaagcagagcttgg

SEQ ID NO: 273 - DNA, 20 bp, Homo sapiens
actactgcaacacgctgacg

SEQ ID NO: 274 - DNA, 20 bp, Homo sapiens
tacaggaaggcatcccagac

SEQ ID NO: 275 - DNA, 20 bp, Homo sapiens
agtttcacaccagcctggaa

SEQ ID NO: 276 - DNA, 20 bp, Homo sapiens
ttttcaagctggcttttcgt

SEQ ID NO: 277 - DNA, 20 bp, Homo sapiens
attgccaatgtctggttggt

SEQ ID NO: 278 - DNA, 20 bp, Homo sapiens
catggtgaagagctggaaca

SEQ ID NO: 279 - DNA, 20 bp, Homo sapiens
cagagagaccctgcaagacc

SEQ ID NO: 280 - DNA, 20 bp, Homo sapiens
ctcaaatgggccttaggaca

SEQ ID NO: 281 - DNA, 20 bp, Homo sapiens
tcaaaacactcctgggctct

SEQ ID NO: 282 - DNA, 20 bp, Homo sapiens
tccctgaaactcgccatatc

SEQ ID NO: 283 - DNA, 20 bp, Homo sapiens
caggcatatcccagtgaggt

SEQ ID NO: 284 - DNA, 20 bp, Homo sapiens
caattggagagtggggattg

SEQ ID NO: 285 - DNA, 20 bp, Homo sapiens
tactccccgtactgcctcac

SEQ ID NO: 286 - DNA, 20 bp, Homo sapiens
gcccacttctgcttgatctc

SEQ ID NO: 287 - DNA, 20 bp, Homo sapiens
acttacgaagaggccaagca

SEQ ID NO: 288 - DNA, 20 bp, Homo sapiens
gtccttcccaaaaatgctga

SEQ ID NO: 289 - DNA, 20 bp, Homo sapiens
cagctgaccaggactgtgaa

SEQ ID NO: 290 - DNA, 20 bp, Homo sapiens
tctaggtgtgccctggaaac

SEQ ID NO: 291 - DNA, 20 bp, Homo sapiens
caagtctccttcccctttcc

SEQ ID NO: 292 - DNA, 20 bp, Homo sapiens
gggttgtggcaacagaaagt

SEQ ID NO: 293 - DNA, 20 bp, Homo sapiens
tgagcccaggagttcaagac

SEQ ID NO: 294 - DNA, 20 bp, Homo sapiens
ctctgttgcctaggctggac

SEQ ID NO: 295 - DNA, 20 bp, Homo sapiens
aagggctatcgggaaacatt

SEQ ID NO: 296 - DNA, 20 bp, Homo sapiens
tgcacggtattaaagcacca

SEQ ID NO: 297 - DNA, 20 bp, Homo sapiens
gatggggcagtacaaggaga

SEQ ID NO: 298 - DNA, 20 bp, Homo sapiens
aggcaggtgaatgtcaaacc

SEQ ID NO: 299 - DNA, 20 bp, Homo sapiens
gcgtgaagaaggtgaagagg

SEQ ID NO: 300 - DNA, 20 bp, Homo sapiens
aatttggcaatgcaggtagg

SEQ ID NO: 301 - DNA, 20 bp, Homo sapiens
tggaagattgctctccgagt

SEQ ID NO: 302 - DNA, 20 bp, Homo sapiens
atggtttcttcggtgtcctg

SEQ ID NO: 303 - DNA, 20 bp, Homo sapiens
gaaacccactagcccaaaca

SEQ ID NO: 304 - DNA, 20 bp, Homo sapiens
ctcagggtcagcagtggagt

SEQ ID NO: 305 - DNA, 20 bp, Homo sapiens
tcgtcgcaatgaagactttg

SEQ ID NO: 306 - DNA, 20 bp, Homo sapiens
cggtcaaagtcaggaagcat

SEQ ID NO: 307 - DNA, 20 bp, Homo sapiens
acgcagaagggagaggagat

SEQ ID NO: 308 - DNA, 20 bp, Homo sapiens
cagggttttgggtctgtgtt

SEQ ID NO: 309 - DNA, 20 bp, Homo sapiens
acctgtcactgttcgggaag

SEQ ID NO: 310 - DNA, 20 bp, Homo sapiens
tgagggaagtgctggtctct

SEQ ID NO: 311 - DNA, 20 bp, Homo sapiens
ggacacagtccgagtggaat

SEQ ID NO: 312 - DNA, 20 bp, Homo sapiens
gggatcagggtgagaatgaa

SEQ ID NO: 313 - DNA, 20 bp, Homo sapiens
aagaagcaagaggcaagctg

SEQ ID NO: 314 - DNA, 20 bp, Homo sapiens
agctcctgcatagcccacta

SEQ ID NO: 315 - DNA, 20 bp, Homo sapiens
cccctcttgacccaatatca

SEQ ID NO: 316 - DNA, 20 bp, Homo sapiens
ggtccaccaccaagtcaaag

SEQ ID NO: 317 - DNA, 20 bp, Homo sapiens
ccagccttgtttggagatgt

SEQ ID NO: 318 - DNA, 20 bp, Homo sapiens
aaggaatgcccataccatga

SEQ ID NO: 319 - DNA, 20 bp, Homo sapiens
gacagaaacggaaaggcaaa

SEQ ID NO: 320 - DNA, 20 bp, Homo sapiens
ggctggtctcaaactcctga

SEQ ID NO: 321 - DNA, 20 bp, Homo sapiens
cggggagtcgtgattgtact

SEQ ID NO: 322 - DNA, 20 bp, Homo sapiens
tataaccttccgtggggaca

SEQ ID NO: 323 - DNA, 20 bp, Homo sapiens
tcgtctgggtcctccactac

SEQ ID NO: 324 - DNA, 20 bp, Homo sapiens
tggcagcaactgcatttaac

SEQ ID NO: 325 - DNA, 20 bp, Homo sapiens
gcagagtggagatgtgtgga

SEQ ID NO: 326 - DNA, 20 bp, Homo sapiens
caatgggaaatcccaggtaa

SEQ ID NO: 327 - DNA, 20 bp, Homo sapiens
ctgaacctgagggcaagaag

SEQ ID NO: 328 - DNA, 20 bp, Homo sapiens
gactgatctgaggggagcag

SEQ ID NO: 329 - DNA, 20 bp, Homo sapiens
ggagggagggtctaccaatg

SEQ ID NO: 330 - DNA, 20 bp, Homo sapiens
atacagctttgggctcagga

SEQ ID NO: 331 - DNA, 20 bp, Homo sapiens
accctggtttgtgagagtgc

SEQ ID NO: 332 - DNA, 20 bp, Homo sapiens
cactttcaccccagtcctgt

SEQ ID NO: 333 - DNA, 20 bp, Homo sapiens
cagctcaggtacccaggaag

SEQ ID NO: 334 - DNA, 20 bp, Homo sapiens
taagctgcctccacgcttat

SEQ ID NO: 335 - DNA, 20 bp, Homo sapiens
cgaaggccttgtgaacagat

SEQ ID NO: 336 - DNA, 20 bp, Homo sapiens
cttctgcttctgcagctcct

SEQ ID NO: 337 - DNA, 20 bp, Homo sapiens
accccttctaccctccaaga

SEQ ID NO: 338 - DNA, 20 bp, Homo sapiens
agtacctcctgcatggaacg

SEQ ID NO: 339 - DNA, 20 bp, Homo sapiens
cccactccagcctcttacac

SEQ ID NO: 340 - DNA, 20 bp, Homo sapiens
ctggctctctctggctccta

SEQ ID NO: 341 - DNA, 20 bp, Homo sapiens
ctccccagaagagcagtgac

SEQ ID NO: 342 - DNA, 20 bp, Homo sapiens
ggttttccttccaaccccta

SEQ ID NO: 343 - DNA, 20 bp, Homo sapiens
cacccccagacatcacctac

SEQ ID NO: 344 - DNA, 20 bp, Homo sapiens
tggttctccaggatgactcc

SEQ ID NO: 345 - DNA, 20 bp, Homo sapiens
ggtcagcaagcagctctacc

SEQ ID NO: 346 - DNA, 20 bp, Homo sapiens
cacccacagaggaagtcgat

SEQ ID NO: 347 - DNA, 20 bp, Homo sapiens
ttcgtcatcctcacagcaag

SEQ ID NO: 348 - DNA, 20 bp, Homo sapiens
acgacgtcaagaacccaaac

SEQ ID NO: 349 - DNA, 20 bp, Homo sapiens
ctgctttttgaccccaagac

SEQ ID NO: 350 - DNA, 20 bp, Homo sapiens
tcatcaaattgcagctctgg

SEQ ID NO: 351 - DNA, 20 bp, Homo sapiens
tcgagagtgggaagaaggaa

SEQ ID NO: 352 - DNA, 20 bp, Homo sapiens
tcggtgctattcgctctttt

SEQ ID NO: 353 - DNA, 20 bp, Homo sapiens
cttcctcaggggaacatgaa

SEQ ID NO: 354 - DNA, 20 bp, Homo sapiens
atccgaaaggagcccttaaa

SEQ ID NO: 355 - DNA, 20 bp, Homo sapiens
catccagagctgctgagaaa

SEQ ID NO: 356 - DNA, 20 bp, Homo sapiens
tggaacacaccattgcattt

SEQ ID NO: 357 - DNA, 20 bp, Homo sapiens
ctgggcgtcaaagtcttctc

SEQ ID NO: 358 - DNA, 20 bp, Homo sapiens
gagcagcacacttgctcaac

SEQ ID NO: 359 - DNA, 20 bp, Homo sapiens
gggacaattctgcactggat

SEQ ID NO: 360 - DNA, 20 bp, Homo sapiens
acgggtctccggaagactat

SEQ ID NO: 361 - DNA, 20 bp, Homo sapiens
attgggtctgcaactcatcc

SEQ ID NO: 362 - DNA, 20 bp, Homo sapiens
cgctttggaagattcatggt

SEQ ID NO: 363 - DNA, 20 bp, Homo sapiens
gcctatagcctgcagctcac

SEQ ID NO: 364 - DNA, 20 bp, Homo sapiens
agtactggccgttgaggttg

SEQ ID NO: 365 - DNA, 20 bp, Homo sapiens
aaggtggagcaaacacaacc

SEQ ID NO: 366 - DNA, 20 bp, Homo sapiens
tccacttggctttctgtcct

SEQ ID NO: 367 - DNA, 20 bp, Homo sapiens
atgagagctcaccaggtgct

SEQ ID NO: 368 - DNA, 20 bp, Homo sapiens
tcaggagcagtgtgatcagg

SEQ ID NO: 369 - DNA, 20 bp, Homo sapiens
ccaggcagaactgattccat

SEQ ID NO: 370 - DNA, 20 bp, Homo sapiens
agggggaccattcaggtcta

SEQ ID NO: 371 - DNA, 20 bp, Homo sapiens
gggtggtcaagctgtgagat

SEQ ID NO: 372 - DNA, 20 bp, Homo sapiens
acagcagcagccttttagga

SEQ ID NO: 373 - DNA, 20 bp, Homo sapiens
tggggctagtagagccttca

SEQ ID NO: 374 - DNA, 20 bp, Homo sapiens
gatttctctcgtccgcaaac

SEQ ID NO: 375 - DNA, 19 bp, Homo sapiens
gagtgagctgccttctttg

SEQ ID NO: 376 - DNA, 20 bp, Homo sapiens
agctttggagtctggctgtc

SEQ ID NO: 377 - DNA, 20 bp, Homo sapiens
tcttcaaggaggagggtgaa

SEQ ID NO: 378 - DNA, 20 bp, Homo sapiens
cggaggctctgtaccttctg

SEQ ID NO: 379 - DNA, 20 bp, Homo sapiens
caatgcccttcgacctaaaa

SEQ ID NO: 380 - DNA, 20 bp, Homo sapiens
tcacttcctttgcacactcg

SEQ ID NO: 381 - DNA, 20 bp, Homo sapiens
taccagagcccatggatttc

SEQ ID NO: 382 - DNA, 20 bp, Homo sapiens
cctgctgggtattctccaag

SEQ ID NO: 383 - DNA, 20 bp, Homo sapiens
tggaagtactgtgcctgctg

SEQ ID NO: 384 - DNA, 20 bp, Homo sapiens
tgcatgttgttggtgacctt

SEQ ID NO: 385 - DNA, 20 bp, Homo sapiens
cagcagattggggatgctat

SEQ ID NO: 386 - DNA, 20 bp, Homo sapiens
ttggtgacccactgaaatga

SEQ ID NO: 387 - DNA, 23 bp, Homo sapiens
tcaccacaaactacagtgtcagc

SEQ ID NO: 388 - DNA, 25 bp, Homo sapiens
gaaagaagcaaattatcactgaaca

SEQ ID NO: 389 - DNA, 20 bp, Homo sapiens
cccaagaaacctcaaaagca

SEQ ID NO: 390 - DNA, 20 bp, Homo sapiens
tttgattccaggaagccatc

SEQ ID NO: 391 - DNA, 20 bp, Homo sapiens
gcaggcacaaacaagactga

SEQ ID NO: 392 - DNA, 20 bp, Homo sapiens
aggaagatcgtcgggaaaat

SEQ ID NO: 393 - DNA, 20 bp, Homo sapiens
gcagttctttgtgcagacca

SEQ ID NO: 394 - DNA, 20 bp, Homo sapiens
ttctcagcttcctgctcctc

SEQ ID NO: 395 - DNA, 20 bp, Homo sapiens
gctattctggaggcgttgtc

SEQ ID NO: 396 - DNA, 20 bp, Homo sapiens
aggcctcttcttctccttgg

SEQ ID NO: 397 - DNA, 20 bp, Homo sapiens
acgcaacaatggcacaatta

SEQ ID NO: 398 - DNA, 20 bp, Homo sapiens
caggttttcgggaaagatca

SEQ ID NO: 399 - DNA, 20 bp, Homo sapiens
ctgccagtgggaacatcttt

SEQ ID NO: 400 - DNA, 20 bp, Homo sapiens
ccatcttcccaggagtgaaa

SEQ ID NO: 401 - DNA, 20 bp, Homo sapiens
cccagatggagaaagctctg

SEQ ID NO: 402 - DNA, 20 bp, Homo sapiens
tgacgactccttgttcacca

SEQ ID NO: 403 - DNA, 20 bp, Homo sapiens
ttcttgctgttggcgtactg

SEQ ID NO: 404 - DNA, 20 bp, Homo sapiens
tcccaaccttcattgctagg

SEQ ID NO: 405 - DNA, 20 bp, Homo sapiens
tcaacaaggagcatgagcac

SEQ ID NO: 406 - DNA, 20 bp, Homo sapiens
agtgtgcctttaccccactg

SEQ ID NO: 407 - DNA, 20 bp, Homo sapiens
catttgcattgtcctgatgg

SEQ ID NO: 408 - DNA, 20 bp, Homo sapiens
caggccagcaaactctcttc

SEQ ID NO: 409 - DNA, 20 bp, Homo sapiens
actccccaaaattccctctg

SEQ ID NO: 410 - DNA, 20 bp, Homo sapiens
cttcttcacccccttcttcc

SEQ ID NO: 411 - DNA, 20 bp, Homo sapiens
caccaggaaaatcagccttc

SEQ ID NO: 412 - DNA, 20 bp, Homo sapiens
taaccaaaaccagccaaagg

SEQ ID NO: 413 - DNA, 20 bp, Homo sapiens
ataccgatcgcattcaggtc

SEQ ID NO: 414 - DNA, 20 bp, Homo sapiens
tgggatttttccacagaagc

SEQ ID NO: 415 - DNA, 20 bp, Homo sapiens
gggacatgctttggaagaaa

SEQ ID NO: 416 - DNA, 20 bp, Homo sapiens
gctgtaactcctccccttcc

SEQ ID NO: 417 - DNA, 20 bp, Homo sapiens
aggagcctggaggaaatgtt

SEQ ID NO: 418 - DNA, 20 bp, Homo sapiens
cccctataagaatgcgcaga

SEQ ID NO: 419 - DNA, 20 bp, Homo sapiens
ccagtctgcgaactgtacga

SEQ ID NO: 420 - DNA, 20 bp, Homo sapiens
tgcctggtctgtagggtctc

SEQ ID NO: 421 - DNA, 20 bp, Homo sapiens
tccgatccaaaattgttcgt

SEQ ID NO: 422 - DNA, 20 bp, Homo sapiens
tccgagtcgtacatgtggaa

SEQ ID NO: 423 - DNA, 22 bp, Homo sapiens
tgcaaaagaaactggaacttga

SEQ ID NO: 424 - DNA, 21 bp, Homo sapiens
tgcttatttcttccacctgaa

SEQ ID NO: 425 - DNA, 22 bp, Homo sapiens
caactggcatctacacaagaca

SEQ ID NO: 426 - DNA, 20 bp, Homo sapiens
attggtccccatagcagatg

SEQ ID NO: 427 - DNA, 20 bp, Homo sapiens
ctacgccaacatgaactcca

SEQ ID NO: 428 - DNA, 20 bp, Homo sapiens
gaggtccatgatccactggt

SEQ ID NO: 429 - DNA, 20 bp, Homo sapiens
agtcctgcagagtccttcca

SEQ ID NO: 430 - DNA, 20 bp, Homo sapiens
atgcgcatttccacaataca

SEQ ID NO: 431 - DNA, 20 bp, Homo sapiens
tcatccaggtgtggtttcaa

SEQ ID NO: 432 - DNA, 20 bp, Homo sapiens
cccgcactgtacctgactct

SEQ ID NO: 433 - DNA, 20 bp, Homo sapiens
aaagggaatgtggccttttt

SEQ ID NO: 434 - DNA, 20 bp, Homo sapiens
tgaaagagatccccagccta

SEQ ID NO: 435 - DNA, 20 bp, Homo sapiens
ctcccttctgagcctctcct

SEQ ID NO: 436 - DNA, 20 bp, Homo sapiens
ctccaccagcactgagacaa

SEQ ID NO: 437 - DNA, 20 bp, Homo sapiens
accctacccagtaccctgct

SEQ ID NO: 438 - DNA, 20 bp, Homo sapiens
tgagttacgggagggagttg

SEQ ID NO: 439 - DNA, 20 bp, Homo sapiens
acgatggagtgtttggaagg

SEQ ID NO: 440 - DNA, 20 bp, Homo sapiens
aggacgcctcaggtaggttt

SEQ ID NO: 441 - DNA, 20 bp, Homo sapiens
aggtcagccacattcaggag

SEQ ID NO: 442 - DNA, 20 bp, Homo sapiens
tgcggagtatggtcactgag

SEQ ID NO: 443 - DNA, 20 bp, Homo sapiens
ccttcgagtaccaccgctac

SEQ ID NO: 444 - DNA, 20 bp, Homo sapiens
ttcccatgcatattcccaat

SEQ ID NO: 445 - DNA, 20 bp, Homo sapiens
gcgcacaatcattgagtttc

SEQ ID NO: 446 - DNA, 20 bp, Homo sapiens
tgcataaattggccgaagat

SEQ ID NO: 447 - DNA, 20 bp, Homo sapiens
cagatccgagctcctactgc

SEQ ID NO: 448 - DNA, 20 bp, Homo sapiens
cagccacacgattttcaaga

SEQ ID NO: 449 - DNA, 20 bp, Homo sapiens
acaagcctgcagctcatttt

SEQ ID NO: 450 - DNA, 20 bp, Homo sapiens
cttttgccctcactggctac

SEQ ID NO: 451 - DNA, 20 bp, Homo sapiens
gtttccgagggaagaaggac

SEQ ID NO: 452 - DNA, 20 bp, Homo sapiens
agctttggggttttcaggat

SEQ ID NO: 453 - DNA, 20 bp, Homo sapiens
aaggaacaggaatgctgtgg

SEQ ID NO: 454 - DNA, 20 bp, Homo sapiens
ctaaagccagccccatacag

SEQ ID NO: 455 - DNA, 20 bp, Homo sapiens
gtcatgagtctcggctggtt

SEQ ID NO: 456 - DNA, 20 bp, Homo sapiens
gtcggtcactggttgaactg

SEQ ID NO: 457 - DNA, 20 bp, Homo sapiens
cattctggaggcaaagaacc

SEQ ID NO: 458 - DNA, 20 bp, Homo sapiens
ccacctgcactttctggatt

SEQ ID NO: 459 - DNA, 20 bp, Homo sapiens
atgcccgagaaaatgaaatg

SEQ ID NO: 460 - DNA, 20 bp, Homo sapiens
accacttcccagcatctttg

SEQ ID NO: 461 - DNA, 20 bp, Homo sapiens
cccagaacaagaaggtgagc

SEQ ID NO: 462 - DNA, 20 bp, Homo sapiens
aattcagaagcctgcaagga

SEQ ID NO: 463 - DNA, 20 bp, Homo sapiens
gagaaggtcactgagcagca

SEQ ID NO: 464 - DNA, 20 bp, Homo sapiens
gggatgtgcagggagtagag

SEQ ID NO: 465 - DNA, 20 bp, Homo sapiens
gcagatccccactgtcctac

SEQ ID NO: 466 - DNA, 20 bp, Homo sapiens
gttctctgtggttggggaaa

SEQ ID NO: 467 - DNA, 20 bp, Homo sapiens
ggctacgacattcgcctaag

SEQ ID NO: 468 - DNA, 20 bp, Homo sapiens
tcagccactcgattgtcaag

SEQ ID NO: 469 - DNA, 20 bp, Homo sapiens
cagctgttcgtccttcatca

SEQ ID NO: 470 - DNA, 20 bp, Homo sapiens
gtttcctgacaggcccacta

SEQ ID NO: 471 - DNA, 20 bp, Homo sapiens
tcaccattgtggaccaaaga

SEQ ID NO: 472 - DNA, 20 bp, Homo sapiens
ctctgggaggacattggaaa

SEQ ID NO: 473 - DNA, 21 bp, Homo sapiens
ggttgctcttgaaatcctcct

SEQ ID NO: 474 - DNA, 21 bp, Homo sapiens
tccttggaaacatttgaggaa

SEQ ID NO: 475 - DNA, 20 bp, Homo sapiens
tggcacctttaaggcttttg

SEQ ID NO: 476 - DNA, 20 bp, Homo sapiens
ccgagcaatgccagtatctt

SEQ ID NO: 477 - DNA, 19 bp, Homo sapiens
gacggtgtcaggacattgg

SEQ ID NO: 478 - DNA, 20 bp, Homo sapiens
cctgcaggttgacaaaaggt

SEQ ID NO: 479 - DNA, 20 bp, Homo sapiens
caactgcccagaaaagggta

SEQ ID NO: 480 - DNA, 20 bp, Homo sapiens
atggcaggtcacagtccttc

SEQ ID NO: 481 - DNA, 20 bp, Homo sapiens
acgtggtactggaggagtgg

SEQ ID NO: 482 - DNA, 20 bp, Homo sapiens
aatgcttggtgtggatgaca

SEQ ID NO: 483 - DNA, 20 bp, Homo sapiens
ctctccgtgaaggaagatgc

SEQ ID NO: 484 - DNA, 20 bp, Homo sapiens
ctgcttagggctgcaatgtt

SEQ ID NO: 485 - DNA, 20 bp, Homo sapiens
tcaccactcacagggtcaaa

SEQ ID NO: 486 - DNA, 20 bp, Homo sapiens
gtgggctccaggataatgtg

SEQ ID NO: 487 - DNA, 22 bp, Homo sapiens
cccaaggtaagtgaaaagttgg

SEQ ID NO: 488 - DNA, 21 bp, Homo sapiens
acatgcaagtttggaaacagt

SEQ ID NO: 489 - DNA, 21 bp, Homo sapiens
tcacctatgttccctggctaa

SEQ ID NO: 490 - DNA, 20 bp, Homo sapiens
atggaagcacccatcatagc

SEQ ID NO: 491 - DNA, 20 bp, Homo sapiens
agcgtgctaaactccaggtg

SEQ ID NO: 492 - DNA, 20 bp, Homo sapiens
tattgccttcaggtggtgtg

SEQ ID NO: 493 - DNA, 20 bp, Homo sapiens
tggtatccaaggccacaact

SEQ ID NO: 494 - DNA, 19 bp, Homo sapiens
gggcagccagaaaaatcat

SEQ ID NO: 495 - DNA, 20 bp, Homo sapiens
actggtgaaaaaccctgtgg

SEQ ID NO: 496 - DNA, 20 bp, Homo sapiens
gcggagttccaactcatcat

SEQ ID NO: 497 - DNA, 20 bp, Homo sapiens
aatccagggctcttcagtca

SEQ ID NO: 498 - DNA, 20 bp, Homo sapiens
ccaggcagtggtgatagctt

SEQ ID NO: 499 - DNA, 20 bp, Homo sapiens
acttgcaggtgtctcccttg

SEQ ID NO: 500 - DNA, 20 bp, Homo sapiens
ttaacaagtcctgccagcaa

SEQ ID NO: 501 - DNA, 17 bp, Homo sapiens
agccgagccacatcgct

SEQ ID NO: 502 - DNA, 19 bp, Homo sapiens
gtgaccaggcgcccaatac

SEQ ID NO: 503 - DNA, 28 bp, Homo sapiens
caaatccgttgactccgaccttcacctt

SEQ ID NO: 504 - DNA, 21 bp, Homo sapiens
agccggcgccatctatgtctt

SEQ ID NO: 505 - DNA, 21 bp, Homo sapiens
caactggctacggaccaagtt

SEQ ID NO: 506 - DNA, 21 bp, Homo sapiens
acgctaatggactccactatt

SEQ ID NO: 507 - DNA, 21 bp, Homo sapiens
gaggtgagtggctacgatgtt

SEQ ID NO: 508 - DNA, 21 bp, Homo sapiens
tggcgatgaccactcagaatt

SEQ ID NO: 509 - DNA, 21 bp, Homo sapiens
ccacgtggacagcaccatgtt

SEQ ID NO: 510 - DNA, 21 bp, Homo sapiens
gcccctcaagtcgggtatgtt

SEQ ID NO: 511 - DNA, 21 bp, Homo sapiens
gggtggcaagcatcacctttt

SEQ ID NO: 512 - DNA, 21 bp, Homo sapiens
gccgacagcggtctaggaatt

SEQ ID NO: 513 - DNA, 21 bp, Homo sapiens
gcaggccgacatcatgatctt

SEQ ID NO: 514 - DNA, 21 bp, Homo sapiens
cattggaggagacacccactt

SEQ ID NO: 515 - DNA, 21 bp, Homo sapiens
aggagacaagcattgggtgtt

SEQ ID NO: 516 - DNA, 23 bp, Homo sapiens
aaagccggcgccatctatgtctt

SEQ ID NO: 517 - DNA, 23 bp, Homo sapiens
aacaactggctacggaccaagtt

SEQ ID NO: 518 - DNA, 23 bp, Homo sapiens
aaacgctaatggactccactaca

SEQ ID NO: 519 - DNA, 23 bp, Homo sapiens
aagaggtgagtggctacgatgag

SEQ ID NO: 520 - DNA, 23 bp, Homo sapiens
aatggcgatgaccactcagaagg

SEQ ID NO: 521 - DNA, 23 bp, Homo sapiens
aaccacgtggacagcaccatgaa

SEQ ID NO: 522 - DNA, 23 bp, Homo sapiens
aagcccctcaagtcgggtatgaa

SEQ ID NO: 523 - DNA, 23 bp, Homo sapiens
aagggtggcaagcatcaccttgg

SEQ ID NO: 524 - DNA, 23 bp, Homo sapiens
aagccgacagcggtctaggaatt

SEQ ID NO: 525 - DNA, 23 bp, Homo sapiens
aagcaggccgacatcatgatctt

SEQ ID NO: 526 - DNA, 23 bp, Homo sapiens
aacattggaggagacacccactt

SEQ ID NO: 527 - DNA, 23 bp, Homo sapiens
aaaggagacaagcattgggtgtt
